(19) United States
(12) Patent Application Publication
(10) Pub. No.: US 2025/0145950 A1
(43) Pub. Date: May 8, 2025

(54) Methods for Activation and Expansion of T Cells

(71) Applicant: Alaunos Therapeutics, Inc., Houston, TX (US)

(72) Inventors: Drew Caldwell DENIGER, Houston, TX (US); Lenka Victoria HURTON, Houston, TX (US); Donghyun JOO, Houston, TX (US); Yaoyao SHI, Houston, TX (US); An LU, Houston, TX (US); Victor CARPIO, Houston, TX (US); Matthew COLLINSON-PAUTZ, Houston, TX (US)

(73) Assignee: Alaunos Therapeutics, Inc., Houston, TX (US)

(21) Appl. No.: 18/834,112

(22) PCT Filed: Feb. 1, 2023
(86) PCT No.: PCT/US2023/061765

§ 371 Date: Jul. 29, 2024

Related U.S. Application Data
(60) Provisional application No. 63/267,424, filed on Feb. 1, 2022.

(51) Int. Cl. C12N 5/0783; C12N 15/85

(52) U.S. Cl. CPC C12N 5/0636; C12N 15/85; C12N 2500/32; C12N 2501/2302; C12N 2501/2307; C12N 2501/2312; C12N 2501/2315; C12N 2501/2321; C12N 2510/00

(57) ABSTRACT

Methods for culturing and expanding lymphocytes using unconventional cytokines are provided. These methods include techniques for culturing and expanding lymphocytes using streamlined approaches, including approaches using agonists for stimulation, and approaches more suitable for clinical manufacturing. Compositions of expanded populations of lymphocytes are also provided.

### INCORPORATION OF SEQUENCE LISTING

[0001] This application is a U.S. National Phase application of International Application No. PCT/US2023/061765, filed Feb. 1, 2023, which claims the benefit of U.S. Provisional Application No. 63/267,424, filed Feb. 1, 2022, the entire contents of each of which are incorporated herein by reference. A sequence listing contained in the file named P35189WO00_SL.XML, which is 2,206,103 bytes (measured in MS-Windows®) and was created on Feb. 1, 2023, is filed electronically herewith and incorporated by reference in its entirety.

### FIELD

[0002] The instant disclosure relates to methods and compositions for activation and/or expansion of electroporated lymphocyte populations, e.g., electroporated T cells.

### BACKGROUND

[0003] Lymphocytes, in particular T cells are increasingly engineered for use in treatment of various pathologies. In order to use engineered T cells therapeutically, primary cells need to be transfected and cultured and often further expanded while maintaining the genetic alterations made to the cells. Methods exist for expansion and manipulation of T cells, but methods that can more reliably produce more cells quickly are needed to improve cell therapy.

### SUMMARY

[0004] The instant disclosure provides methods for culturing and expanding lymphocytes, in particular T cells, using unconventional culture components. In some embodiments, the T cells have been genetically modified.

[0005] Provided herein is a method of expanding a population of electroporated T cells comprising culturing the electroporated T cells with a first culture medium comprising one or more cytokines. In some embodiments, the electroporated T cells are contacted with the first culture medium within 12 hours of electroporation. In some embodiments, the one or more cytokines are selected from the group consisting of IL-7, IL-15, and IL-21. In some embodiments, the first culture medium further comprises an exogenous glutathione precursor. In some embodiments, the glutathione precursor is N-acetylcysteine (NAC). In some embodiments, the first culture medium comprises IL-15. In some embodiments, the first culture medium comprises IL-7. In some embodiments, the first culture medium comprises IL-21. In some embodiments, the first culture medium comprises IL-7 and IL-21.

[0006] Also provided herein is a method of expanding a population of electroporated T cells comprising culturing the electroporated T cells with a first culture medium comprising an exogenous glutathione precursor and IL-15, wherein the electroporated T cells are contacted with the first culture medium within 12 hours of electroporation. In some embodiments, the glutathione precursor is N-acetylcysteine (NAC). In some embodiments, the first culture medium comprises IL-7. In some embodiments, the first culture medium comprises IL-21. In some embodiments, the first culture medium comprises IL-7 and IL-21.

[0007] In some embodiments, the electroporated T cells were electroporated prior to culturing with the first culture medium. In some embodiments, the electroporated T cells are cultured in the first culture medium for 6-12 hours after electroporation.

[0008] In some embodiments, the method also includes culturing the T cells with a second culture medium, wherein the second culture medium comprises one or more cytokines selected from the group consisting of IL-7, IL-12, and IL-21. In some embodiments, the second culture medium comprises IL-7, IL-12, and IL-21.

[0009] In some embodiments, IL-21 is added to the second culture medium every 2 to 3 days. In some embodiments, at least one of the cytokines selected from the group consisting of IL-7 and IL-12 are added to the second culture medium only on the first day of culturing. In some embodiments, IL-7 and IL-12 are added to the second culture medium only on the first day of culturing. In some embodiments, the T cells are cultured in the second culture medium after being cultured in the first culture medium. In some embodiments, the T cells are cultured in the second culture medium for 11 to 13 days.

[0010] In some embodiments, the method also includes culturing the T cells with a third culture medium, wherein the third culture medium comprises one or more cytokines selected from the group consisting of IL-2 and IL-21. In some embodiments, the third culture medium comprises IL-2. In some embodiments, the third culture medium comprises IL-21. In some embodiments, the third culture medium further comprises IL-12. In some embodiments, the third culture medium further comprises an exogenous glutathione precursor. In some embodiments, the exogenous glutathione precursor in NAC. In some embodiments, the third culture medium comprises IL-12, IL-21 and NAC. In some embodiments, the third culture medium comprises IL-2, IL-12, IL-21 and NAC.

[0011] In some embodiments, IL-21 is added to the third culture medium every 2 to 3 days. In some embodiments, IL-2 is added to the third culture medium every 3 to 4 days. In some embodiments, IL-2 is present in the third culture medium in an amount from 30 U/ml to 3000 U/ml. In some embodiments, the IL-12 is added to the third culture medium only on the first day of culturing. In some embodiments, the T cells are cultured in the third culture medium after being cultured in the second culture medium. In some embodiments, the T cells are cultured in the third culture medium for 11 to 13 days.

[0012] In some embodiments, the T cells are cultured in the third culture medium after being cultured in the second culture medium. In some embodiments, the T cells are cultured in the third culture medium for 11 to 13 days.

[0013] In some embodiments, the first, second and/or third culture media further comprise a TCR agonist. In some embodiments, the TCR agonist is a CD3 agonist. In some embodiments, the first, second and/or third culture media further comprise an agonist of a T cell costimulatory molecule. In some embodiments, the agonist of a T cell costimulatory molecule is a CD28 agonist.

[0014] In some embodiments, the first, second and/or third culture media further comprise a nanomatrix. In some embodiments, the TCR agonist and/or the T cell costimulatory molecule is associated with the nanomatrix.

[0015] In some embodiments, the method also includes culturing the cells with feeder cells.

[0016] Also provided herein is a population of engineered T cells manufactured according to any of the methods described above or herein. In some embodiments, more than 10% of the engineered T cells in the population comprise one or more of the following: an exogenous TCR or functional fragment thereof, and an exogenous membrane-bound IL-15. In some embodiments, more than 2% of the engineered T cells in the population co-express an exogenous TCR or functional fragment thereof and an exogenous membrane-bound IL-15.

[0017] In some embodiments, more than 10% of the engineered T cells in the population comprise an exogenous TCR or functional fragment thereof, and wherein more than 20% of the population of engineered T cells are CCR7+/CD45RO+. In some embodiments, more than 10% of the engineered T cells in the population comprise an exogenous TCR or functional fragment thereof, and wherein more than 40% of the population of engineered T cells are CD95+/CD62L+. In some embodiments, the population of engineered T cells comprise more than 5%, 10%, 15%, 20%, 25%, 30%, 35%, 40%, 45% or 50% CD45RA+CD45RO-CD62L+CD95+ cells. In some embodiments, the population of engineered T cells comprise more than 5%, 10%, 15%, 20%, 25%, 30%, 35%, 40%, 45% or 50% CD45RA+CD45RO+CD62L+CD95+ cells.

[0018] Provided herein is a population of cells comprising a polycistronic expression cassette comprising a first cistron comprising a polynucleotide sequence that encodes a fusion protein that comprises IL-15, or a functional fragment or functional variant thereof, and IL-15Rα, or a functional fragment or functional variant thereof; a second cistron comprising a polynucleotide sequence that encodes a TCR beta chain comprising a Vβ region and a Cβ region; and a third cistron comprising a polynucleotide sequence that encodes a TCR alpha chain comprising a Vα region and a Cα region. In some embodiments, the population of cells are T cells that comprise more than 5%, 10%, 15%, 20%, 25%, 30%, 35%, 40%, 45% or 50% CD45RA+CD45RO-CD62L+CD95+ cells. In other embodiments, the population of cells are T cells that comprise more than 5%, 10%, 15%, 20%, 25%, 30%, 35%, 40%, 45% or 50% CD45RA+CD45RO+CD62L+CD95+ cells.

[0019] Also provided herein is a population of cells comprising a polycistronic expression cassette comprising a first cistron comprising a polynucleotide sequence that encodes a fusion protein that comprises IL-15, or a functional fragment or functional variant thereof, and IL-15Rα, or a functional fragment or functional variant thereof, a second cistron comprising a polynucleotide sequence that encodes a TCR beta chain comprising a Vβ region and a Cβ region; and a third cistron comprising a polynucleotide sequence that encodes a TCR alpha chain comprising a Vα region and a Cα region, wherein the population of cells are T cells that comprise more than 5%, 10%, 15%, 20%, 25%, 30%, 35%, 40%, 45% or 50% CD45RA+CD45RO-CD62L+CD95+ cells.

[0020] Also provided herein is a population of cells comprising a polycistronic expression cassette comprising a first cistron comprising a polynucleotide sequence that encodes a fusion protein that comprises IL-15, or a functional fragment or functional variant thereof, and IL-15Rα, or a functional fragment or functional variant thereof, a second cistron comprising a polynucleotide sequence that encodes a TCR beta chain comprising a Vβ region and a Cβ region; and a third cistron comprising a polynucleotide sequence that encodes a TCR alpha chain comprising a Vα region and a Cα region, wherein the population of cells are T cells that comprise more than 5%, 10%, 15%, 20%, 25%, 30%, 35%, 40%, 45% or 50% CD45RA+CD45RO+CD62L+CD95+ cells.

### BRIEF DESCRIPTION OF THE DRAWINGS

[0021] The accompanying drawings which are incorporated in and constitute a part of this specification, illustrate exemplary embodiments of the present disclosure and, together with the description, serve to explain principles of the present disclosure.

[0022] FIG. 1 is a set of schematics of the structures of TCRα (A), TCRβ (B), and mbIL15 (15), shown from N terminus (left) to C terminus (right).

[0023] FIG. 2A is a set of schematics of the ORFs of tricistronic Cassettes APBT15, ATBP15, AP15 TB, AT15PB, BPAT15, BTAP15, BP15TA, and BT15PA. FIG. 2B is a set of schematics of the ORFs of control Cassettes 15, APB, and BPA.

[0024] FIG. 3 is a schematic diagram depicting double transposition and single transposition approaches using a Sleeping Beauty transposon/transposase system to generate T cells expressing TCRα/TCRβ and mbIL15.

[0025] FIG. 4 is a set of 2-parameter flow plots showing transgene co-expression as assessed after electroporation and overnight incubation for each of Groups 1-14.

[0026] FIG. 5A-5C shows TCR and mbIL15 expression after electroporation in various recovery media (Day 1). FIG. 5A provides representative TCR and mbIL15 expression data from cells cultured overnight with recovery media containing different cytokines+/−N-acetylcysteine (NAC). FIG. 5B provides TCR expression data from four donors presented as % mTCR+ cells out of CD3+ cells. FIG. 5C provides TCR and mbIL15 co-expression data from four donors presented as % TCR+mbIL15+ cells out of CD3+ cells.

[0027] FIG. 6A-6C shows TCR and mbIL15 expression after first phase expansion in various first expansion media (Day 13). FIG. 6A provides representative TCR and mbIL15 expression data from cells expanded with first expansion media containing a TCR and co-stimulation agonist and different cytokines. FIG. 6B provides TCR expression data from two donors presented as % mTCR+ cells out of CD3+ cells. FIG. 6C provides TCR and mbIL15 co-expression data from two donors presented as % TCR+mbIL15+ cells out of CD3+ cells. *indicates the cytokine was added on the first day of the expansion phase only.

[0028] FIG. 7A-7C shows TCR and mbIL15 expression after first phase expansion in various first expansion media (Day 13). FIG. 7A provides representative TCR and mbIL15 expression data from cells expanded with first expansion media containing a TCR and co-stimulation agonist different cytokines. FIG. 7B provides TCR expression data from three donors presented as % mTCR+ cells out of CD3+ cells. FIG. 7C provides TCR and mbIL15 co-expression data from three donors presented as % TCR+mbIL15+ cells out of CD3+ cells. *indicates the cytokine was added on the first day of the expansion phase only.

[0029] FIG. 8A-8C shows TCR and mbIL15 expression after second phase expansion in various second expansion media (Day 13). FIG. 8A provides representative TCR and mbIL15 expression data from cells expanded with second expansion media a TCR and co-stimulation agonist and different cytokines in differing concentrations+/−NAC. FIG. 8B provides TCR expression data from three donors presented as % mTCR+ cells out of CD3+ cells. FIG. 8C provides TCR and mbIL15 co-expression data from three donors presented as % TCR+mbIL15+ cells out of CD3+ cells. *indicates the cytokine was added on the first day of the expansion phase only.

[0030] FIG. 9 shows the fold expansion of T cells during second phase expansion in varying second phase expansion media containing a TCR and co-stimulation agonist and different cytokines in differing concentrations+/−NAC.

[0031] FIG. 10A is a set of 2-parameter flow plots showing representative TCR transgene expression in CD3+ cells after overnight incubation for each of Groups 1-14. FIG. 10B provides TCR expression data from three donors presented as % mTCR+ cells out of CD3+ cells.

[0032] FIG. 11A-11C shows TCR and mbIL15 expression after first phase expansion (Day 13). FIG. 11A provides representative TCR and mbIL15 expression data from each of Groups 1-14. FIG. 11B provides TCR expression data from three donors presented as % mTCR+ cells out of CD3+ cells. FIG. 11C provides TCR and mbIL15 co-expression data from three donors presented as % TCR+mbIL15+ cells out of CD3+ cells.

[0033] FIG. 12A-12B shows total numbers of TCR+ and TCR+mbIL15+ cells after first phase expansion (Day 13). FIG. 12A provides TCR expression data from three donors presented as total number of mTCR+ T cells. FIG. 12B provides total number of TCR+mbIL15+ T cells from three donors.

[0034] FIG. 13A-13B shows cell viability after electroporation (Day 1; FIG. 13A) and after first phase expansion (Day 13; FIG. 13B) for each of Groups 1-14.

[0035] FIG. 14A-14B shows specific induction of activation marker, 4-1BB, after overnight co-culture of transposed T cells from each of Groups 1-14 after first phase expansion (Day 13) with wild-type or mutant neoantigen pulsed T2 cells. Data is presented as % 4-1BB positive cells of CD8+ cells at increasing concentrations of neoantigen peptide.

[0036] FIG. 15 shows phosphorylated STAT5 levels in transposed CD3+ T cells from each of Groups 1-14 after first phase expansion (Day 13). Isotype negative control and IL-15 treated positive control was included for comparison. (dTp=double transposed with separate mbIL15 and TCR vectors).

[0037] FIG. 16 shows apoptosis levels in transposed T cells from each of Groups 2-14 after being expanded for 13 days and then activated for 9 days with CD3/CD28 Dynabeads® (ThermoFisher).

[0038] FIG. 17 is a set of schematics illustrating the differences between the S version and N version of the TCR only and mbIL15 TCR constructs shown from N terminus (left) to C terminus (right).

[0039] FIG. 18 shows phosphorylated STAT5 levels after second phase expansion (Day 27) in CD3+ T cells transposed with different versions of polycistronic plasmids encoding TCR001. Some containing non-cysteine substituted TCR constant regions (N version) or that are optionally further codon-optimized (NU version). Non-transposed (NT)=NT (Group 2.1); BPA (Group 2.2); BPA-N (Group 2.3); AP15 TB (Group 2.4); AP15 TB-N (Group 2.5); AP15 TB-NU (Group 2.6); BP15TA (Group 2.7); BP15TA-N (Group 2.8); and BP15TA-NU (Group 2.9).

[0040] FIG. 19A-19B shows functional data from transposed T cells co-cultured with neoantigen pulsed dendritic cells. FIG. 19A shows specific induction of activation marker, 4-1BB, after overnight co-culture of transposed T cells from each of Groups 2.1-2.9 after second phase expansion (Day 27) with wild-type or mutant neoantigen peptide pulsed dendritic cells. Data is presented as % 4-1BB positive cells of CD8+ cells at increasing concentrations of neoantigen peptide. FIG. 19B shows interferon-7 (IFN-γ) secretion after overnight co-culture of transposed T cells from each of Groups 2.1-2.9 after second phase expansion (Day 27) with wild-type or mutant neoantigen pulsed dendritic cells.

[0041] FIG. 20A-20B shows TCR expression and cell survival after 4 weeks of long-term cytokine withdrawal (LTWD) incubation in transduced cells from each of Groups 2.2-2.9. FIG. 20A shows the expression of mTCR detected on CD3+ gated population with mouse TCR beta antibody and FIG. 20B shows cell survival as the percent of live cells recovered relative to initial input number of cells at the beginning of the LTWD.

[0042] FIG. 21A-21B shows specific induction of activation marker, 4-1BB, after overnight co-culture of transposed T cells from each of Groups 2.2-2.9 after 4 weeks of LTWD incubation with wild-type or mutant neoantigen (10 μg/ml) pulsed dendritic cells.

[0043] FIG. 22A-22B shows IFN-γ secretion after overnight co-culture of transposed T cells from each of Groups 2.2-2.9 after 4 weeks of LTWD incubation with wild-type or mutant neoantigen (10 μg/ml) pulsed dendritic cells.

[0044] FIG. 23A-23C is a set of pie charts showing the mean frequency of live CD3⁺ T cell memory and effector subsets at day 11 post-expansion (FIG. 23A), day 22 post-expansion (FIG. 23B), and after 4 weeks of LTWD culture (FIG. 23C) in cells transposed with the tested plasmids (Groups 2.2-2.9).

[0045] FIG. 24 is a set of 2-parameter flow plots showing representative TCR and mbIL15 transgene co-expression in CD3+ cells after overnight incubation (Day 1), after first phase expansion (Day 11, pre- and post-enrichment) and after second phase expansion (Day 22) for each of Groups 3.2-3.4 expressing TCR001+/−mbIL15 (BPA-N, AP15 TB-NU, and BP15TA-NU).

[0046] FIG. 25A-25C shows TCR+ population changes during the first expansion phase (Day 1 vs. Day 11 pre-enrichment) for cells transposed with various TCRs+/−mbIL15 (Groups 3.1-3.30). Each graph presents data from a separate TCR; TCR only=BPA-N, TCR with mbIL15=AP15 TB-NU or BP15TA-NU.

[0047] FIG. 26A-26C shows TCR+ population changes during the second expansion phase (Day 11 post-enrichment vs. Day 22) for cells transposed with various TCRs+/−mbIL15 (Groups 3.1-3.30). Each graph presents data from a separate TCR; TCR only=BPA-N, TCR with mbIL15=AP15 TB-NU or BP15TA-NU.

[0048] FIG. 27A-27C shows TCR+/mbIL15+ population changes during the first expansion phase (Day 1 vs. Day 11 pre-enrichment) for cells transposed with various TCRs+/−mbIL15 (Groups 3.1-3.30). Each graph presents data from a separate TCR; =BPA-N, TCR with mbIL15=AP15 TB-NU or BP15TA-NU.

[0049] FIG. 28A-28C shows TCR+/mbIL15+ population changes during the second expansion phase (Day 11 post-enrichment vs. Day 22) for cells transposed with various TCRs+/−mbIL15 (Groups 3.1-3.30). Each graph presents data from a separate TCR; =BPA-N, TCR with mbIL15=AP15 TB-NU or BP15TA-NU.

[0050] FIG. 29A-29I shows specific induction of activation marker, 4-1BB, after overnight co-culture of transposed T cells from each of Groups 3.1-3.30 after second phase expansion (Day 27) with wild-type (WT) or mutant (Mut) neoantigen pulsed dendritic cells. Data is presented as % 4-1BB positive cells of CD8+ cells at increasing concentrations of neoantigen peptide. NT=non-transposed; TCR only=BPA-N, TCR with mbIL15=AP15 TB-NU or BP15TA-NU.

[0051] FIG. 30A-30I shows IFN-γ secretion after overnight co-culture of transposed T cells from each of Groups 3.1-3.30 after second phase expansion (Day 27) with wild-type (WT) or mutant (Mut) neoantigen pulsed dendritic cells. Data is presented as IFN-γ level (pg/ml) at increasing concentrations of neoantigen peptide. NT=non-transposed; TCR only=BPA-N, TCR with mbIL15=AP15 TB-NU or BP15TA-NU.

[0052] FIG. 31 shows the specific lysis of negative control (Mut+HLA−) tumor cell line AU565 and target tumor cell line TYK-nu (Mut+HLA+) by T cells expressing TCR001+/−mbIL15. NT=non-transposed; TCR001 only=BPA-N, TCR001 with mbIL15=AP15 TB-NU or BP15TA-NU.

[0053] FIG. 32A-32B shows the specific lysis of a tumor cell line by T cells expressing (FIG. 32A) TCR022+/−mbIL15 or (FIG. 32B) TCR075+/−mbIL15. Tumor cell line was transfected with the appropriate HLA-expression plasmid and pulsed with either wild type (WT) or mutant (Mut) peptides and co-cultured with T cells. NT=non-transposed; TCR only=BPA-N, TCR with mbIL15=AP15 TB-NU or BP15TA-NU.

[0054] FIG. 33 shows TCR+ population for cells transposed with various TCRs+/−mbIL15 (Groups 3.1-3.30) after long-term cytokine withdrawal (LTWD). TCR only=BPA-N, TCR with mbIL15=AP15 TB-NU or BP15TA-NU.

[0055] FIG. 34A-34C shows cell survival for cells transposed with various TCRs+/−mbIL15 (Groups 3.1-3.30) after long-term cytokine withdrawal (LTWD). BPA-N (IL2)=TCR only cultured with IL2, NT=non-transposed, TCR with mbIL15=AP15 TB-NU or BP15TA-NU.

[0056] FIG. 35A-35C shows specific induction of activation marker, 4-1BB, after overnight co-culture of cells transposed with various TCRs+/−mbIL15 (Groups 3.1-3.30) after long-term cytokine withdrawal (LTWD) with wild-type or mutant neoantigen pulsed dendritic cells. BPA-N (IL2)=TCR only cultured with IL2, NT=non-transposed, TCR with mbIL15=AP15 TB-NU or BP15TA-NU.

[0057] FIG. 36A-36C shows IFN-γ secretion after overnight co-culture of cells transposed with various TCRs+/−mbIL15 (Groups 3.1-3.30) after long-term cytokine withdrawal (LTWD) with wild-type or mutant neoantigen pulsed dendritic cells. BPA-N (IL2)=TCR only cultured with IL2, NT=non-transposed, TCR with mbIL15=AP15 TB-NU or BP15TA-NU.

[0058] FIG. 37A-37C shows a comparison of 4-1BB induction in cells transposed with various TCRs+mbIL15 (Groups 3.1-3.30) pre- and post-LTWD culture after overnight co-culture with wild-type or mutant neoantigen pulsed dendritic cells.

[0059] FIG. 38 is a set of representative pie charts showing the mean frequency of live CD3⁺ T cell memory and effector subsets at day 11 post-expansion of cells transposed with TCR001 expressed from either BPA-N or with mbIL15 from either AP15 TB-NU or BP15TA-NU.

[0060] FIG. 39 is a set of representative pie charts showing the mean frequency of live CD3⁺ T cell memory and effector subsets at day 22 post-expansion of cells transposed with TCR001 expressed from either BPA-N or with mbIL15 from either AP15 TB-NU or BP15TA-NU.

[0061] FIG. 40A-40E is a set of pie charts showing the mean frequency of live CD3⁺ T cell memory and effector subsets of in cells transposed with the tested plasmids (Groups 3.1-3.30) after 4 weeks of LTWD culture.

### DETAILED DESCRIPTION

[0062] Improved methods for culturing and/or expanding lymphocytes using unconventional culture components are provided. In some embodiments, the lymphocytes are T cells. In some embodiments, the T cells have been subject to electroporation. In some embodiments, the electroporation occurs within 12 hours of contacting the T cells with a first culture medium. In some embodiments, the culture components of the first culture medium comprise one or more cytokines. In some embodiments, the one or more cytokines are selected from the group consisting of IL-7, IL-15, and IL-21. In some embodiments, the culture components of the first culture medium comprise IL-15. In some embodiments, the culture components of the first culture medium comprise an exogenous glutathione precursor. In some embodiments, the culture components of the first culture medium comprise IL-15 and an exogenous glutathione precursor. In some embodiments, the culture components of the first culture medium also comprise IL-7. In some embodiments, the culture components of the first culture medium also comprise IL-21, In some embodiments, the exogenous glutathione precursor is N-acetylcysteine (NAC). In some embodiments, the culture components of the first culture medium comprise IL-7, IL-15 and NAC.

[0063] In another aspect, the methods for culturing and/or expanding lymphocytes using unconventional culture components comprises a second culture medium. In some embodiments, the lymphocytes are T cells. In some embodiments, the T cells are cultured and/or expanded in the second culture medium after being cultured and/or expanded in the first culture medium. In some embodiments, the T cells are electroporated in the second culture medium. In some embodiments, the second culture medium comprises IL-2, IL-7, IL-12, IL-15 and/or IL-21. In some embodiments, the second culture medium comprises IL-7, IL-12 and/or IL-21. In some embodiments, the second culture medium comprises IL-7. In some embodiments, the second culture medium comprises IL-12. In some embodiments, the second culture medium comprises IL-21. In some embodiments, the second culture medium comprises IL-7 and IL-21. In some embodiments, the second culture medium comprises IL-7, IL-12 and IL-21. In some embodiments, one or more of the cytokines is provided in the second culture medium only at day 1, whereas other cytokines are replenished throughout the culture period. In some embodiments, one or more of IL-7, IL-12 and/or IL-21 are provided only on day 1 of culture. In some embodiments, IL-7 is provided only on day 1 of culture. In some embodiments, IL-12 is provided only on day 1 of culture. In some embodiments, IL-7 and IL-12 is provided only on day 1 of culture. In some embodiments, IL-21 is provided at regular intervals throughout the culture period. In some embodiments, IL-7 and IL-12 is provided only on day 1 of culture and IL-21 is provided at regular intervals throughout the culture period.

[0064] In another aspect, the methods for culturing and/or expanding lymphocytes using unconventional culture components comprise a third culture medium. In some embodiments, the lymphocytes are T cells. In some embodiments, the T cells are cultured and/or expanded in the third culture medium after being cultured and/or expanded in the first culture medium. In some embodiments, the T cells are cultured and/or expanded in the third culture medium after being cultured and/or expanded in the second culture medium. In some embodiments, the T cells are cultured and/or expanded in the third culture medium after being cultured and/or expanded in the first and second culture media. In some embodiments, the third culture medium comprises one or more of IL-2, IL-12, IL-15 and IL-21. In some embodiments, the third culture medium comprises one or more of IL-2, IL-12 and IL-21. In some embodiments, the third culture medium comprises IL-2. In some embodiments, the third culture medium comprises IL-12. In some embodiments, the third culture medium comprises IL-21. In some embodiments, the third culture medium comprises NAC. In some embodiments, the third culture medium comprises IL-12, IL-21 and NAC. In some embodiments, the third culture medium comprises IL-2, IL-12, IL-21 and NAC. In some embodiments, one or more of IL-2, IL-12 and/or IL-21 are provided only on day 1 of culture. In some embodiments, IL-12 is provided only on day 1 of culture. In some embodiments, IL-2 and IL-21 are provided at regular intervals throughout the culture period. In some embodiments, IL-12 is provided only on day 1 of culture and IL-2 and IL-21 are provided at regular intervals throughout the culture period.

[0065] In certain embodiments, the first culture medium utilized in the methods herein does not comprise IL-2, IL-12, or IL-21; both IL-2 and IL-21; both IL-2 and IL-12; both IL-12 and IL-21; or all of IL-2, IL-12 and IL-21. In certain embodiments, the second culture medium does not comprise IL-2 or IL-15; both IL-2 and IL-15. In certain embodiments, the third culture medium does not comprise IL-2, IL-7 or IL-15; both IL-2 and IL-15; both IL-2 and IL-7; both IL-7 or IL15; or all of IL-2, IL-7 and IL-15.

[0066] In some embodiments, the culture media described herein also include one or more TCR agonists and one or more agonists of a T cell costimulatory molecule. In some embodiments, the TCR agonist is a CD3 agonist. In some embodiments, the agonist of a T cell costimulatory molecule is a CD28 agonist. In some embodiments, the culture media described herein also include a nanomatrix. In some embodiments, the TCR agonist and/or the T cell costimulatory molecule is associated with the nanomatrix. In other embodiments, the T cells are cultured with feeder cells.

[0067] In some embodiments, the first, second and/or third, utilized in the described methods is supplemented with one or more T cell-stimulating cytokines at a time interval selected from the group consisting of 1 day, 2 days, 3 days, 4 days, 5 days, and 6 days. In some embodiments, the T cell-stimulating cytokine that is supplemented is IL-2 and/or IL-21. In one embodiment, 30% to 99% of the first culture medium is changed at a time interval selected from the group consisting of 1 day, 2 days, 3 days, 4 days, 5 days, and 6 days.

[0068] In another aspect, the present disclosure provides a population of engineered T cells, wherein most of the engineered T cells in the population comprise an exogenous TCR or functional fragment thereof, and wherein more than 20% of the population of engineered T cells are CCR7+/CD45RO+. In another aspect, the present disclosure provides a population of engineered T cells, and wherein most of the engineered T cells in the population comprise an exogenous TCR or functional fragment thereof, wherein more than 20% of the population of engineered T cells are memory T cells (e.g., a central memory T cell, an effector memory T cell, a stem cell-like memory T cells). In some embodiments, the T cells are electroporated with a vector that expresses the exogenous TCR or functional fragment thereof. In some embodiments, the T cells are cultured and/or expanded according to any of the methods provided herein.

[0069] In another aspect, the present disclosure provides a population of engineered T cells, wherein most of the engineered T cells in the population comprise an exogenous TCR or functional fragment thereof, and wherein more than 40% of the population of engineered T cells are CD95+/CD62L+. In another aspect, the present disclosure provides a population of engineered T cells, wherein most of the engineered T cells in the population comprise an exogenous TCR or functional fragment thereof, and wherein more than 20% of the population of engineered T cells are memory T cells (e.g., a central memory T cell, an effector memory T cell, a stem cell memory T cells). In some embodiments, the T cells are electroporated with a vector that expresses the exogenous TCR or functional fragment thereof. In some embodiments, the T cells are cultured and/or expanded according to any of the methods provided herein.

### 1.1 Definitions

[0070] Generally, nomenclature used in connection with cell and tissue culture, molecular biology, immunology, microbiology, genetics, and protein and nucleic acid chemistry and hybridization described herein is well-known and commonly used in the art. The methods and techniques provided herein are generally performed according to conventional methods well known in the art and as described in various general and more specific references that are cited and discussed throughout the present specification unless otherwise indicated. Enzymatic reactions and purification techniques are performed according to manufacturer's specifications, as commonly accomplished in the art or as described herein. The nomenclature used in connection with, and the laboratory procedures and techniques of molecular and cell biology and biochemistry described herein are well-known and commonly used in the art.

[0071] Unless defined otherwise, all technical and scientific terms used herein have the same meaning as is commonly understood by one of skill in the art to which the claimed subject matter belongs. It is to be understood that the foregoing general description and the following detailed description are exemplary and explanatory only and are not restrictive of any subject matter claimed. In this application, the use of the singular includes the plural unless specifically stated otherwise. It must be noted that, as used in the specification and the appended claims, the singular forms “a,” “an,” and “the” include plural referents unless the context clearly dictates otherwise. In this application, the use of “or” means “and/or” unless stated otherwise. Furthermore, use of the term “including” as well as other forms, such as “include”, “includes,” and “included,” is not limiting. The section headings used herein are for organizational purposes only and are not to be construed as limiting the subject matter described.

[0072] As used herein, the terms “about” and “approximately,” when used to modify a numeric value or numeric range, indicate that deviations of 5% to 10% above (e.g., up to 5% to 10% above) and 5% to 10% below (e.g., up to 5% to 10% below) the value or range remain within the intended meaning of the recited value or range.

[0073] As used herein, the phrase “lymphocytes” refers to B cells, T cells or natural killer (NK) cells. T cells include, but are not limited to, naïve T cells (CD4+ or CD8+); killer CD8+ T cells; cytotoxic CD4+ T cells; helper CD4+ T cells; CD4+ T cells corresponding to Th1, Th2, Th9, Th17, Th22, follicular helper (Tfh), regulatory (Treg) lineages; tumor infiltrating lymphocytes (TILs); and memory T cells (central memory, effector memory, stem cell memory, stem cell-like memory).

[0074] As used herein, the phrase “electroporated lymphocytes” or “electroporated T cells” refers to a population of lymphocytes or T cells that have been electroporated with a one or more exogenous nucleic acids (e.g., a plasmid).

[0075] As used herein, the phrase “population of cells” refers to a number of cells, e.g., electroporated T cells that share common traits. In general, populations generally range from 1×10⁶ to 1×10¹¹ in number, with different T cell populations comprising different numbers. In some embodiments, the population of cells is monoclonal. In other embodiments, the population of cells is polyclonal. In some embodiments, when the population of cells is polyclonal, the cells still share one or more common traits. A monoclonal T cell population will result in the predominance of a single TCR-gene rearrangement pattern. In contrast, polyclonal T cell populations have diverse TCR-gene rearrangement pattern, which can make them more effective in certain situations. As used herein, the phrase “expanding a population of cells” is synonymous with “proliferating a population of cells” and refers to increasing the number of cells in an electroporated population.

[0076] As used herein, the phrase “expansion process” refers to the process whereby the number of cells in an electroporated T cell population is increased. Processes where electroporated T cells are merely isolated or enriched without substantial increase in the number of electroporated T cells are not expansion processes.

[0077] As used herein, “exogenous glutathione precursor” refers to compounds that increase the levels of glutathione in a cell culture media. Exogenous glutathione precursors include, cysteine, glycine, glutamate, glutamine, N-acetylcysteine (NAC), and N-acetylcysteine amide (NACA). In some embodiments, the exogenous glutathione precursor is NAC.

[0078] As used herein, the term “cytokine” refers to a broad category of small proteins (about 5-20 kDa in size) that are important in cell signaling. Cytokines are peptides and cannot cross the lipid bilayer of cells to enter the cytoplasm. Cytokines have been shown to be involved in autocrine signaling, paracrine signaling, and endocrine signaling as immunomodulating agents. Cytokines include chemokines, interferons, interleukins, lymphokines, and tumor necrosis factors, but generally not hormones or growth factors, although there is some overlap in terminology. Cytokines are produced by a broad range of cells, including immune cells like macrophages, B lymphocytes, T lymphocytes, and mast cells, as well as endothelial cells, fibroblasts, and various stromal cells. Cytokines generally act through binding to cell-surface receptors and are especially important in the immune response, since they are involved in regulating the maturation, growth, and responsiveness of particular cell populations.

[0079] As used herein, the phrase “T cell-stimulating cytokine” refers to a cytokine that stimulates and/or activates T cell lymphocytes. In some embodiments, the T-cell stimulating cytokine is IL-2, IL-7, IL-12, IL-15 or IL-21. In certain embodiments, T cell-stimulating cytokines are produced in a cell from a viral vector.

[0080] As used herein, the term “IL-2” (also referred to herein as “IL2”) refers to the cytokine and T cell growth factor known as interleukin-2, and includes all forms of IL-2, including human and mammalian forms, forms with conservative amino acid substitutions, glycoforms, biosimilars, and variants thereof. IL-2 is described, e.g., in Nelson, J. Immunol. 2004, 172, 398388 and Malek, Annu. Rev. Immunol. 2008, 26, 453-79, the disclosures of which are incorporated herein by reference in their entireties. The term IL-2 encompasses human, recombinant forms of IL-2, such as aldesleukin (PROLEUKIN, available commercially from multiple suppliers in 22 million IU per single use vials), as well as the form of recombinant IL-2 commercially supplied by CellGenix, Inc., Portsmouth, N.H., USA (CELLGRO GMP) or ProSpec-Tany TechnoGene Ltd., East Brunswick, N.J., USA (Cat. No. CYT-209-b) and other commercial equivalents from other vendors. Aldesleukin (des-alanyl-1, serine-125 human IL-2) is a nonglycosylated human recombinant form of IL-2 with a molecular weight of approximately 15 kDa. The term IL-2 also encompasses pegylated forms of IL-2, including the pegylated IL-2 prodrug NKTR-214, available from Nektar Therapeutics, South San Francisco, Calif., USA. NKTR-214 and pegylated IL-2 suitable for use in the invention is described in U.S. Patent Application Publication No. US 2014/0328791 A1 and International Patent Application Publication No. WO 2012/065086 A1, the disclosures of which are incorporated herein by reference in their entireties. Alternative forms of conjugated IL-2 suitable for use in the invention are described in U.S. Pat. Nos. 4,766,106, 5,206,344, 5,089,261 and 4,902,502, the disclosures of which are incorporated herein by reference in their entireties. Formulations of IL-2 suitable for use in the invention are described in U.S. Pat. No. 6,706,289, the disclosure of which is incorporated herein by reference in its entirety. The human IL2 gene is identified by NCBI Gene ID 3558. An exemplary nucleotide sequence for a human IL2 gene is the NCBI Reference Sequence: NG 016779.1.

[0081] Interleukin-2 (IL-2) is an interleukin, a type of cytokine signaling molecule in the immune system. It is a 15.5-16 kDa protein that regulates the activities of white blood cells (leukocytes, often lymphocytes) that are responsible for immunity. IL-2 is part of the body's natural response to microbial infection. IL-2 mediates its effects by binding to IL-2 receptors, which are expressed by lymphocytes. The major sources of IL-2 are activated CD4+ T cells and activated CD8+ T cells.

[0082] IL-2 has essential roles in key functions of the immune system, tolerance and immunity, primarily via its direct effects on T cells. In the thymus, where T cells mature, it prevents autoimmune diseases by promoting the differentiation of certain immature T cells into regulatory T cells, which suppress other T cells that are otherwise primed to attack normal healthy cells in the body. IL-2 enhances activation-induced cell death (AICD). IL-2 also promotes the differentiation of T cells into effector T cells and into memory T cells when the initial T cell is also stimulated by an antigen, thus helping the body fight off infections. Together with other polarizing cytokines, IL-2 stimulates naive CD4+ T cell differentiation into Th1 and Th2 lymphocytes while it impedes differentiation into Th17 and follicular helper T (Tfh) lymphocytes. Its expression and secretion are tightly regulated and functions as part of both transient positive and negative feedback loops in mounting and dampening immune responses. Through its role in the development of T cell immunologic memory, which depends upon the expansion of the number and function of antigen-selected T cell clones, it plays a role in enduring cell-mediated immunity.

[0083] The methods for expanding populations of electroporated T cells as provided in the present disclosure utilize IL-15. IL-15 (also referred to herein as “IL15”) refers to the cytokine and T cell growth factor known as interleukin-15, and as utilized in the present invention, includes all forms of IL-15, including human and other mammalian forms, forms with conservative amino acid substitutions, glycoforms, biosimilars, and variants thereof. IL-15 is described, e.g., in Steel J C, Waldmann T A, Morris J C (January 2012) “Interleukin-15 biology and its therapeutic implications in cancer,” Trends in Pharmacological Sciences, 33 (1): 35-41 and Waldmann T A, Tagaya Y (1999) “The multifaceted regulation of interleukin-15 expression and the role of this cytokine in NK cell differentiation and host response to intracellular pathogens,” Annual Review of Immunology, 17: 19-49, the disclosures of which are incorporated herein by reference in their entireties. The term IL-15 also encompasses recombinant forms of IL-15. As used herein, the term IL-15 also encompasses pegylated forms of IL-15. The human IL15 gene is identified by NCBI Gene ID 3600. An example nucleotide sequence for a human IL15 gene is the NCBI Reference Sequence: NG 029605.2.

[0084] IL-7 is a cytokine secreted by stromal cells in the bone marrow and thymus. It is also produced by keratinocytes, dendritic cells, hepatocytes, neurons, and epithelial cells, but is not produced by normal lymphocytes. IL-7 stimulates the differentiation of multipotent (pluripotent) hematopoietic stem cells into lymphoid progenitor cells (as opposed to myeloid progenitor cells where differentiation is stimulated by IL-3). It also stimulates proliferation of all cells in the lymphoid lineage (B cells, T cells and NK cells). It is important for proliferation during certain stages of B-cell maturation, T and NK cell survival, development and homeostasis. An example nucleotide sequence for a human IL7 gene is the NCBI Reference Sequence: AH006906.2.

[0085] IL-21 is a cytokine that has potent regulatory effects on cells of the immune system, including natural killer (NK) cells and cytotoxic T cells that can destroy virally infected or cancerous cells. This cytokine induces cell division/proliferation in its target cells. IL-21 is expressed in activated human CD4+ T cells but not in most other tissues. In addition, IL-21 expression is up-regulated in Th2 and Th17 subsets of T helper cells, as well as follicular helper T cells. In fact, it was shown that IL-21 can be used to identify peripheral follicular helper T cells. Furthermore, IL-21 is expressed in NK T cells regulating the function of these cells. An example nucleotide sequence for a human IL21 gene is the NCBI Reference Sequence: LC133256.1.

[0086] IL-12 is a cytokine that is naturally produced by dendritic cells, macrophages, neutrophils, and human B-lymphoblastoid cells (NC-37) in response to antigenic stimulation. This cytokine is involved in the differentiation of naive T cells into Th1 cells. IL-12 also plays an important role in the activities of natural killer cells and T lymphocytes. Moreover, IL-12 mediates enhancement of the cytotoxic activity of NK cells and CD8+ cytotoxic T lymphocytes. An example nucleotide sequence for a human IL12 gene is the NCBI Reference Sequence: NM000882.4.

[0087] In some embodiments, the T cell-stimulating cytokine(s) utilized in the methods herein is selected from the group consisting of IL-2, IL-7, IL-12, IL-15, IL-21, and combinations thereof. In some embodiments, the final concentration of the T cell-stimulating cytokine(s) utilized in the culture media described herein is from about 10 U/ml to about 7,000 U/ml. In some embodiments, the final concentration of T cell-stimulating cytokine(s) utilized in the first culture medium is from about 5 ng/ml to about 3,500 ng/ml.

[0088] As used herein, the term “medium” refers to a liquid or gel designed to support the survival, growth, and/or proliferation of cells in an artificial environment. A medium generally comprises a defined set of components. Such components may include an energy source, growth factors, hormones, stimulants, activators, sugars, salts, vitamins, and/or amino acids, and/or a combination of these. In many embodiments, the medium is cell culture medium.

[0089] As used herein, the phrase “components of the medium are maintained” refers to a medium comprising a defined set of components, such as particular stimulants and activators, where the identity of the components remains constant, but the concentration of one or more of the components may be varied. In certain embodiments, the concentration of one or more components in the media varies over time while the cells are cultured in the media. However, when the media is changed the fresh media has the same components for each change. In some embodiments, in order to maintain the components of a medium the medium must be changed at a certain interval. In some embodiments, the medium is changed every, 2, 4, 8, or 12 hours. In some embodiments, the medium is changed every, 1, 2, 3, 4, 5, 6, 7, 8, 9, 10, 11, 12, 13 or 14 days.

[0090] As used herein, the phrase “anti-CD3 antibody” refers to an antibody or variant thereof, e.g., a monoclonal antibody, and includes human, humanized, chimeric or murine antibodies which are directed against the CD3 receptor in the T cell antigen receptor of mature T cells. Anti-CD3 antibodies include OKT-3, also known as muromonab. Anti-CD3 antibodies also include the UCHT1 clone, also known as T3 and CD3c. Other anti-CD3 antibodies include, for example, otelixizumab, teplizumab, and visilizumab.

[0091] As used herein, the phrase “anti-CD28 antibody” refers to an antibody or variant thereof, e.g., a monoclonal antibody, and includes human, humanized, chimeric or murine antibodies which are directed against the CD28 receptor in the T cell antigen receptor of mature T cells.

[0092] In some embodiments, an anti-4-1BB antibody can be utilized as a 4-1BB ligand.

[0093] As used herein, the phrase “anti-4-1BB antibody” refers to an antibody or variant thereof, e.g., a monoclonal antibody, and includes human, humanized, chimeric or murine antibodies which are directed against 4-1BB.

[0094] As used herein, the phrase “anti-CD2 antibody” refers to an antibody or variant thereof, e.g., a monoclonal antibody, and includes human, humanized, chimeric or murine antibodies which are directed against the CD2 receptor in the T cell antigen receptor of mature T cells.

[0095] As used herein, the term “OKT-3” (also referred to herein as “OKT3”) refers to the anti-CD3 antibody produced by Miltenyi Biotech, Inc., San Diego, Calif., USA) and or biosimilar or variant thereof (e.g., a humanized, chimeric, or affinity matured variant). A hybridoma capable of producing OKT-3 is available in the American Type Culture Collection and assigned the ATCC accession number CRL 8001. A hybridoma capable of producing OKT-3 is available in the European Collection of Authenticated Cell Cultures (ECACC) and assigned Catalogue No. 86022706.

[0096] As used herein, the term “UCHT1” refers to the anti-CD3 antibody described in Beverley and Callard (1981) Eur. J. Immunol. 11: 329-334, and or biosimilar or variant thereof (e.g., a humanized, chimeric, or affinity matured variant). A hybridoma capable of producing an exemplary UCHT1 is available from Creative Diagnostics, Shirley, NY, USA, and assigned Catalogue No. CSC-H3068.

[0097] As used herein, the phrase “activation signal” refers to one or more non-endogenous stimuli that cause T cells to become activated. In the endogenous process, T cells become activated when they are presented with peptide antigens by MHC class II molecules, which are expressed on the surface of antigen-presenting cells (APCs). Once activated, the T cells divide rapidly and secrete cytokines that regulate or assist the immune response. The endogenous T cell activation process involves at least (a) activation of the TCR complex, which involves CD3, and (b) co-stimulation of CD28 or 4-1BB by proteins on the APC surface. It is known in the art that the endogenous activation of T cells can be simulated by stimulation of T cells by CD3, CD28 or 4-1BB agonists (e.g., antibodies). Thus, CD3, CD28 and/or 4-1BB can together provide an activation signal to T cells.

[0098] As used herein, the phrase “feeder cell” refers to cells used to provide extracellular secretions that help another cell type proliferate. In certain embodiments, the feeder cells referred to herein are peripheral blood mononuclear cell (PBMC) or an antigen-presenting cell (APC).

[0099] As used herein, the term “nanomatrix” refers to a colloidal suspension of more than one matrix of polymer chains. A nanomatrix is a multiphase material that has dimensions of less than 500 nm or structures having nanoscale repeat distances between the different phases that make up the material. Polymers may include polyethylene, polypropylene, polystyrene, polysaccharide, dextran, and other macromolecules, which are composed of many repeated subunits. A nanomatrix may also have embedded additional functional compounds, such as magnetic, paramagnetic, or superparamagnetic nanocrystals. In addition, functional moieties, such as ligands or agonists can be covalently attached or bound to the polymer chains for specific applications.

[0100] As used herein, the term “matrix” or “mobile matrix” refers to a discrete, isolatable, three-dimensional lattice-type structure where the backbone of the structure can be flexible or mobile and can be composed of materials, such as polymers and ceramics. Being a three-dimensional structure, a matrix can have a smallest dimension and a largest dimension, such as a length. A mobile matrix may be of collagen, purified proteins, purified peptides, polysaccharides, glycosaminoglycans, or extracellular matrix compositions. A polysaccharide may include for example, cellulose ethers, starch, gum arabic, agarose, dextran, chitosan, hyaluronic acid, pectins, xanthan, guar gum, or alginate. Other polymers may include polyesters, polyethers, polyacrylates, polyacrylamides, polyamines, polyethylene imines, polyquaternium polymers, polyphosphazenes, polyvinylalcohols, poly vinylacetates, polyvinylpyrrolidones, block copolymers, or polyurethanes. The mobile matrix may comprise a polymer of dextran. “Matrices” refers to a collection of more than one matrix.

[0101] As used herein, the phrase “largest dimension” in the context of a matrix refers to the longest length of the matrix.

[0102] As used herein, the term “dextran” refers to a complex branched glucan, a polysaccharide derived from the condensation of glucose. Dextran chains are of varying lengths, from 3 to 2000 kilodaltons. The polymer main chain consists of α-1,6 glycosidic linkages between glucose monomers, with branches from α-1,3 linkages.

[0103] As used herein, the phrase “agonists bound to a nanomatrix” refers to agonists that are covalently attached to the polymer chains that comprise the matrices within the nanomatrix.

[0104] As used herein, the phrase “colloidal suspension” refers to a mixture in which one substance, such as a matrix, is suspended throughout another substance, such as a liquid. A colloidal suspension thus has a dispersed phase, i.e., the suspended substance, and a continuous phase, i.e., the medium of suspension, such as a liquid.

[0105] As used herein, the phrase “contacting a population of T cells with a nanomatrix” refers to bringing a population of T cells and the nanomatrix together such that the population of T cells can associate with nanomatrix-bound functional moieties, such as ligands or agonists, or nanomatrix-embedded functional compounds through ionic, hydrogen-bonding, or other types of physical or chemical interactions.

[0106] As use herein, the phrase “colloidal polymer chains” refers to polymer chains that when linked to each other through covalent bonds or other physical or chemical interactions can form colloidal suspensions.

[0107] As used herein, the terms “T cell receptor” and “TCR” are used interchangeably and refer to molecules comprising CDRs or variable regions from αβ T cell receptors. Examples of TCRs include, but are not limited to, full-length TCRs, antigen-binding fragments of TCRs, soluble TCRs lacking transmembrane and cytoplasmic regions, single-chain TCRs containing variable regions of TCRs attached by a flexible linker, TCR chains linked by an engineered disulfide bond, single TCR variable domains, single peptide-MHC-specific TCRs, multi-specific TCRs (including bispecific TCRs), TCR fusions, TCRs comprising co-stimulatory regions, human TCRs, humanized TCRs, chimeric TCRs, recombinantly produced TCRs, and synthetic TCRs. In certain embodiments, the TCR is a full-length TCR comprising a full-length α chain and a full-length β chain. In certain embodiments, the TCR is a soluble TCR lacking transmembrane and/or cytoplasmic region(s). In certain embodiments, the TCR is a single-chain TCR (scTCR) comprising Vα and Vβ linked by a peptide linker, such as a scTCR having a structure as described in PCT Publication No.: WO 2003/020763, WO 2004/033685, or WO 2011/044186, each of which is incorporated by reference herein in its entirety. In certain embodiments, the TCR comprises a transmembrane region. In certain embodiments, the TCR comprises a co-stimulatory signaling region.

[0108] As used herein, the term “full-length TCR” refers to a TCR comprising a dimer of a first and a second polypeptide chain, each of which comprises a TCR variable region and a TCR constant region comprising a TCR transmembrane region and a TCR cytoplasmic region. In certain embodiments, the full-length TCR comprises one or two unmodified TCR chains, e.g., unmodified α or βTCR chains. In certain embodiments, the full-length TCR comprises one or two altered TCR chains, such as chimeric TCR chains and/or TCR chains comprising one or more amino acid substitutions, insertions, or deletions relative to an unmodified TCR chain. In certain embodiments, the full-length TCR comprises a mature, full-length TCR α chain and a mature, full-length TCR β chain.

[0109] As used herein, the term “TCR variable region” refers to the portion of a mature TCR polypeptide chain (e.g., a TCR α chain or β chain) which is not encoded by the TRAC gene for TCR α chains, either the TRBC1 or TRBC2 genes for TCR β chains, or the TRDC gene for TCR δ chains. In some embodiments, the TCR variable region of a TCR α chain encompasses all amino acids of a mature TCR α chain polypeptide which are encoded by a TRAV and/or TRAJ gene, and the TCR variable region of a TCR β chain encompasses all amino acids of a mature TCR β chain polypeptide which are encoded by a TRBV, TRBD, and/or TRBJ gene (see, e.g., Lefranc and Lefranc, (2001) “T cell receptor FactsBook.” Academic Press, ISBN 0-12-441352-8, which is incorporated by reference herein in its entirety). TCR variable regions generally comprise framework regions (FR) 1, 2, 3, and 4 and complementarity determining regions (CDR) 1, 2, and 3.

[0110] As used herein, the terms “a chain variable region” and “Vα” are used interchangeably and refer to the variable region of a TCR α chain.

[0111] As used herein, the terms “β chain variable region” and “Vβ” are used interchangeably and refer to the variable region of a TCR β chain.

[0112] As used herein in the context of a TCR, the term “CDR” or “complementarity determining region” means the noncontiguous antigen combining sites found within the variable regions of a TCR chain (e.g., an α chain or a β chain). These regions have been described in Lefranc, (1999) The Immunologist 7: 132-136; Lefranc et al., (1999) Nucleic Acids Res 27: 209-212; Lefranc (2001) “T cell receptor FactsBook.” Academic Press, ISBN 0-12-441352-8; Lefranc et al., (2003) Dev Comp Immunol. 27(1):55-77; and in Kabat et al., (1991) “Sequences of protein of immunological interest,” each of which is herein incorporated by reference in its entirety. In certain embodiments, CDRs are determined according to the IMGT numbering system described in Lefranc (1999) supra. In certain embodiments, CDRs are defined according to the Kabat numbering system described in Kabat supra. In certain embodiments, CDRs are defined empirically, e.g., based upon a structural analysis of the interaction of a TCR with a cognate antigen (e.g., a peptide or a peptide-MHC complex). In certain embodiments, the α chain and β chain CDRs of a TCR are defined according to different conventions (e.g., according to the Kabat or IMGT numbering systems, or empirically based upon structural analysis).

[0113] As used herein, the term “framework amino acid residues” refers to those amino acids in the framework region of a TCR chain (e.g., an α chain or a β chain). The term “framework region” or “FR” as used herein includes the amino acid residues that are part of the TCR variable region, but are not part of the CDRs.

[0114] As used herein, the term “constant region” with respect to a TCR refers to the portion of a TCR that is encoded by the TRAC gene (for TCR α chains) or either the TRBC1 or TRBC2 gene (for TCR β chains), optionally lacking all or a portion of a transmembrane region and/or all or a portion of a cytoplasmic region. In certain embodiments, a TCR constant region lacks a transmembrane region and a cytoplasmic region. A TCR constant region does not include amino acids encoded by a TRAV, TRAJ, TRBV, TRBD, TRBJ, TRDV, TRDD, TRDJ, TRGV, or TRGJ gene (see, e.g., “T cell receptor FactsBook,” supra).

[0115] As used herein, the terms “major histocompatibility complex” and “MHC” are used interchangeably and refer to an MHC class I molecule and/or an MHC class II molecule.

[0116] As used herein, the term “MHC class I” refers to a dimer of an MHC class I α chain and a β2 microglobulin chain and the term “MHC class II” refers to a dimer of an MHC class II α chain and an MHC class II β chain.

[0117] As used herein, the terms “human leukocyte antigen” and “HLA” are used interchangeably and can also refer to the proteins encoded by the MHC genes. HLA-A, HLA-B, HLA-C, HLA-E, HLA-F, and HLA-G refer to major and minor gene products of MHC class I genes. HLA-DP, HLA-DQ, and HLA-DR refer to gene products of MHC class I genes, which are expressed on antigen-presenting cells, B cells, and T cells.

[0118] As used herein, the term “peptide-MHC complex” refers to an MHC molecule (MHC class I or MHC class II) with a peptide bound in the art-recognized peptide binding pocket of the MHC. In some embodiments, the MHC molecule is a membrane-bound protein expressed on the cell surface. In some embodiments, the MHC molecule is a soluble protein lacking transmembrane or cytoplasmic regions.

[0119] As used herein, the term “extracellular” with respect to a recombinant transmembrane protein refers to the portion or portions of the recombinant transmembrane protein that are located outside of a cell.

[0120] As used herein, the term “transmembrane” with respect to a recombinant transmembrane protein refers to the portion or portions of the recombinant transmembrane protein that are embedded in the plasma membrane of a cell.

[0121] As used herein, the term “cytoplasmic” with respect to a recombinant transmembrane protein refers to the portion or portions of the recombinant transmembrane protein that are located in the cytoplasm of a cell.

[0122] As used herein, the term “co-stimulatory signaling region” refers to the intracellular portion of a co-stimulatory molecule that is responsible for mediating intracellular signaling events.

[0123] “Binding affinity” generally refers to the strength of the sum total of non-covalent interactions between a single binding site of a molecule (e.g., a TCR) and its binding partner (e.g., a peptide-MHC complex). Unless indicated otherwise, as used herein, “binding affinity” refers to intrinsic binding affinity which reflects a 1:1 interaction between members of a binding pair (e.g., a TCR and a peptide-MHC complex). The affinity of a molecule X for its partner Y can generally be represented by the dissociation constant (K_{D}). Affinity can be measured and/or expressed in a number of ways known in the art, including, but not limited to, equilibrium dissociation constant (K_{D}) and equilibrium association constant (K_{A}). The K_{D} is calculated from the quotient of k_{off}/kₒₙ, whereas K_{A} is calculated from the quotient of kₒₙ/k_{off}. Kₒₙ refers to the association rate constant and k_{off} refers to the dissociation rate constant. The kₒₙ and k_{off} can be determined by techniques known to one of ordinary skill in the art, such as use of BIAcore® or KinExA. As used herein, a “lower affinity” refers to a larger K_{D}.

[0124] “Avidity” generally refers to the affinity of a binding molecule (e.g., a TCR) and its binding partner (e.g., a peptide-MHC complex). Binding molecules described herein are able to bind antigen via two (or more) sites in which the multiple interactions synergize to enhance the “apparent” affinity. Avidity is the measure of the strength of binding between the binding molecule described herein (e.g., a TCR) and the pertinent antigens (e.g., a peptide-MHC complex). Avidity is related to both the affinity between an antigenic determinant and its antigen binding site on the antigen-binding molecule and the number of pertinent binding sites present on the antigen-binding molecules.

[0125] For example, “specifically binds to” may be used to refer to the ability of a TCR to preferentially bind to a particular antigen (e.g., a specific peptide or a specific peptide-MHC complex combination) as such binding is understood by one skilled in the art. For example, a TCR that specifically binds to an antigen can bind to other antigens, generally with lower affinity as determined by, e.g., BIAcore®, or other immunoassays known in the art (see, e.g., Savage et al., (1999) Immunity. 10(4):485-92, which is incorporated by reference herein in its entirety). In a specific embodiment, a TCR that specifically binds to an antigen binds to the antigen with an association constant (Kₐ) that is at least 2-fold, 5-fold, 10-fold, 50-fold, 100-fold, 500-fold, 1,000-fold, 5,000-fold, or 10,000-fold greater than the Kₐ when the TCR binds to another antigen.

[0126] As used herein, an “epitope” is a term in the art and refers to a localized region of an antigen (e.g., a peptide or a peptide-MHC complex) to which a TCR can bind. In certain embodiments, the epitope to which a TCR binds can be determined by, e.g., NMR spectroscopy, X-ray diffraction crystallography studies, ELISA assays, hydrogen/deuterium exchange coupled with mass spectrometry (e.g., liquid chromatography electrospray mass spectrometry), flow cytometry analysis, mutagenesis mapping (e.g., site-directed mutagenesis mapping), and/or structural modeling. For X-ray crystallography, crystallization may be accomplished using any of the known methods in the art (e.g., Giegé R et al., (1994) Acta Crystallogr D Biol Crystallogr 50(Pt 4): 339-350; McPherson A, (1990) Eur J Biochem 189: 1-23; Chayen NE, (1997) Structure 5: 1269-1274; McPherson A, (1976) J Biol Chem 251: 6300-6303, each of which is herein incorporated by reference in its entirety). TCR:antigen crystals may be studied using well-known X-ray diffraction techniques and may be refined using computer software such as X-PLOR (Yale University, 1992, distributed by Molecular Simulations, Inc.; see, e.g., Meth Enzymol (1985) volumes 114 & 115, eds Wyckoff H. W., et al.; U.S. 2004/0014194); and BUSTER (Bricogne G, (1993) Acta Crystallogr D Biol Crystallogr 49(Pt 1): 37-60; Bricogne G, (1997) Meth Enzymol 276A: 361-423, ed Carter C W; and Roversi P et al., (2000) Acta Crystallogr D Biol Crystallogr 56(Pt 10): 1316-1323), each of which is herein incorporated by reference in its entirety. Mutagenesis mapping studies may be accomplished using any method known to one of skill in the art. See, e.g., Champe M et al., (1995) J Biol Chem 270: 1388-1394 and Cunningham B C & Wells J A, (1989) Science 244: 1081-1085, each of which is herein incorporated by reference in its entirety, for a description of mutagenesis techniques, including alanine scanning mutagenesis techniques. In a specific embodiment, the epitope of an antigen is determined using alanine scanning mutagenesis studies. In a specific embodiment, the epitope of an antigen is determined using hydrogen/deuterium exchange coupled with mass spectrometry. In certain embodiments, the antigen is a peptide-MHC complex. In certain embodiments, the antigen is a peptide presented by an MHC molecule.

[0127] As used herein, the terms “treat,” “treating,” and “treatment” refer to therapeutic or preventative measures described herein. In some embodiments, the methods of “treatment” employ administration of a TCR or a cell expressing a TCR to a subject having a disease or disorder, or predisposed to having such a disease or disorder, in order to prevent, cure, delay, reduce the severity of, or ameliorate one or more symptoms of the disease or disorder or recurring disease or disorder, or in order to prolong the survival of a subject beyond that expected in the absence of such treatment.

[0128] As used herein, the term “effective amount” in the context of the administration of a therapy to a subject refers to the amount of a therapy that achieves a desired prophylactic or therapeutic effect.

[0129] The determination of “percent identity” between two sequences (e.g., amino acid sequences or nucleic acid sequences) can be accomplished using a mathematical algorithm. A specific, non-limiting example of a mathematical algorithm utilized for the comparison of two sequences is the algorithm of Karlin S & Altschul S F, (1990) PNAS 87: 2264-2268, modified as in Karlin S & Altschul S F, (1993) PNAS 90: 5873-5877, each of which is herein incorporated by reference in its entirety. Such an algorithm is incorporated into the NBLAST and XBLAST programs of Altschul S F et al., (1990) J Mol Biol 215: 403, which is herein incorporated by reference in its entirety. BLAST nucleotide searches can be performed with the NBLAST nucleotide program parameters set, e.g., at score=100, wordlength=12 to obtain nucleotide sequences homologous to a nucleic acid molecule described herein. BLAST protein searches can be performed with the XBLAST program parameters set, e.g., at score=50, wordlength=3 to obtain amino acid sequences homologous to a protein molecule described herein. To obtain gapped alignments for comparison purposes, Gapped BLAST can be utilized as described in Altschul S F et al., (1997) Nuc Acids Res 25: 3389-3402, which is herein incorporated by reference in its entirety. Alternatively, PSI BLAST can be used to perform an iterated search which detects distant relationships between molecules. Id. When utilizing BLAST, Gapped BLAST, and PSI BLAST programs, the default parameters of the respective programs (e.g., of XBLAST and NBLAST) can be used (see, e.g., National Center for Biotechnology Information (NCBI) on the worldwide web, ncbi.nlm.nih.gov). Another specific, non-limiting example of a mathematical algorithm utilized for the comparison of sequences is the algorithm of Myers and Miller, (1988) CABIOS 4:11-17, which is herein incorporated by reference in its entirety. Such an algorithm is incorporated in the ALIGN program (version 2.0) which is part of the GCG sequence alignment software package. When utilizing the ALIGN program for comparing amino acid sequences, a PAM120 weight residue table, a gap length penalty of 12, and a gap penalty of 4 can be used.

[0130] The percent identity between two sequences can be determined using techniques similar to those described above, with or without allowing gaps. In calculating percent identity, typically only exact matches are counted.

[0131] As used herein, the terms “antibody” and “antibodies” include full-length antibodies, antigen-binding fragments of full-length antibodies, and molecules comprising antibody CDRs, VH regions, or VL regions. Examples of antibodies include monoclonal antibodies, recombinantly produced antibodies, monospecific antibodies, multi-specific antibodies (including bispecific antibodies), human antibodies, humanized antibodies, chimeric antibodies, immunoglobulins, synthetic antibodies, tetrameric antibodies comprising two heavy chain and two light chain molecules, an antibody light chain monomer, an antibody heavy chain monomer, an antibody light chain dimer, an antibody heavy chain dimer, an antibody light chain-antibody heavy chain pair, intrabodies, heteroconjugate antibodies, antibody-drug conjugates, single domain antibodies, monovalent antibodies, single chain antibodies or single-chain Fvs (scFv), camelized antibodies, affybodies, Fab fragments, F(ab′)₂ fragments, disulfide-linked Fvs (sdFv), anti-idiotypic (anti-Id) antibodies (including, e.g., anti-anti-Id antibodies), and antigen-binding fragments of any of the above. In certain embodiments, antibodies described herein refer to polyclonal antibody populations. Antibodies can be of any type (e.g., IgG, IgE, IgM, IgD, IgA, or IgY), any class (e.g., IgG₁, IgG₂, IgG₃, IgG₄, IgA₁ or IgA₂), or any subclass (e.g., IgG₂ₐ or IgG_{2b}) of immunoglobulin molecule. In certain embodiments, antibodies described herein are IgG antibodies, or a class (e.g., human IgG₁ or IgG₄) or subclass thereof. In a specific embodiment, the antibody is a humanized monoclonal antibody. In another specific embodiment, the antibody is a human monoclonal antibody.

[0132] As used herein, the term “cistron” refers to a polynucleotide sequence from which a transgene product can be produced.

[0133] As used herein, the term “polycistronic vector” refers to a polynucleotide vector that comprises a polycistronic expression cassette.

[0134] As used herein, the term “polycistronic expression cassette” refers to a polynucleotide sequence wherein the expression of three or more transgenes is regulated by common transcriptional regulatory elements (e.g., a common promoter) and can simultaneously express three or more separate proteins from the same mRNA. Exemplary polycistronic vectors, without limitation, include tricistronic vectors (containing three cistrons) and tetracistronic vectors (containing four cistrons).

[0135] As used herein, the term “polycistronic polynucleotide” refers to a polynucleotide that comprises three or more cistrons.

[0136] As used herein, the term “transcriptional regulatory element” refers to a polynucleotide sequence that mediates regulation of transcription of another polynucleotide sequence. Exemplary transcriptional regulatory elements include, but are not limited to, promoters and enhancers.

[0137] As used herein, a “furin recognition site” refers to an amino acid sequence, or a nucleotide sequence encoding the amino acid sequence, which can be cleaved by the furin enzyme. The furin enzyme is also known as PACE. In some embodiments, the furin recognition site comprises the amino acid sequence RXXR (SEQ ID NO: 1), wherein X at position 2 is any amino acid and X at position 3 is arginine or lysine. In some embodiments, the furin recognition site comprises the sequences shown below in Table 1.

TABLE 1
Amino acid sequences of exemplary furin recognition sites and polynucleotide
sequences encoding same.

| | | SEQ |
|---|---|---|
| | | ID |
| Description | Sequence | NO: |
| Furin recognition site | RAKR | 2 |
| Furin recognition site | CGGGCGAAACGC | 3 |
| polynucleotide coding | | |
| sequence | | |
| Furin recognition site | RAKRSGSG | 4 |
| (alternative) | | |
| Furin recognition site | CGGGCGAAACGCTCTGGAAGCGGA | 5 |
| (alternative) | | |
| polynucleotide coding | | |
| sequence | | |

[0138] In some embodiments, the furin recognition site comprises an amino acid sequence that is identical to the amino acid sequence of SEQ ID NO: 2 or 4, or comprises 1, 2, or 3 amino acid modifications, relative to SEQ ID NO: 2 or 4; or is encoded by a polynucleotide sequence 75%, 80%, 85%, 90%, 95%, 96%, 97%, 98%, 99%, or 100% identical to the polynucleotide sequence of SEQ ID NO: 3 or 5. In some embodiments, when positioned in a vector between a first polynucleotide sequence encoding a first protein and a second polynucleotide sequence encoding a second protein, the furin recognition site is capable of mediating the cleavage (via furin) of the first protein from the second protein, resulting in two distinct polypeptides from the same mRNA molecule.

[0139] Responsive to recognition of the furin recognition site by the furin enzyme, the furin enzyme induces cleavage of a given polypeptide on the C-terminal side of the furin recognition site or a portion thereof. Accordingly, polypeptides produced by furin-mediated cleavage at a furin recognition site may retain all or a portion of the furin recognition site on their C-terminus. For example, the C-terminus of a first polypeptide of the present disclosure may comprise the amino acid sequence RAKR (SEQ ID NO: 2) or RA.

[0140] As used herein, a “2A element” refers to a polynucleotide sequence which, when expressed in an mRNA, can induce ribosomal skipping during translation of the mRNA in a cell. Thus, two separate polypeptides may be produced from a single mRNA molecule. An amino acid sequence encoded by a 2A element is referred to as a “self-cleaving peptide.” 2A elements may be viral in origin. Exemplary 2A elements include T2A elements, P2A elements, E2A elements, and F2A elements.

[0141] As used herein, the term “P2A element” refers to a polynucleotide that (i) comprises a polynucleotide sequence at least 75%, 80%, 85%, 90%, 95%, 96%, 97%, 98%, 99%, or 100% identical to the polynucleotide sequence of SEQ ID NO: 19, or 21; (ii) encodes the amino acid sequence of SEQ ID NO: 18, or 20; or (iii) encodes the amino acid sequence of SEQ ID NO: 18, or 20, comprising 1, 2, or 3 amino acid modifications. In some embodiments, when positioned in a vector between a first polynucleotide sequence encoding a first protein and a second polynucleotide sequence encoding a second protein, the P2A element is capable of mediating the translation of the first polynucleotide sequence and the second polynucleotide sequence as two distinct polypeptides from the same mRNA molecule by preventing the synthesis of a peptide bond, e.g., between the penultimate residue (e.g., glycine) and the ultimate residue (e.g., proline) at the C terminus of the translation product of the P2A element, e.g., such that the penultimate residue (e.g., glycine) becomes the C-terminal residue of the first protein and the ultimate residue (e.g., proline) becomes the N-terminal residue of the second protein. In some embodiments, the P2A element additionally comprises, at its 5′ end, a polynucleotide sequence that encodes a furin recognition site, e.g., RAKR (SEQ ID NO: 2). In some embodiments, the P2A element additionally comprises, at its 5′ end, a polynucleotide sequence that encodes a furin recognition site, e.g., RAKRSGSG (SEQ ID NO: 4), and the P2A element can be termed an “fP2A element.” In some embodiments, a fP2A element refers to a polynucleotide that (i) comprises a polynucleotide sequence at least 75%, 80%, 85%, 90%, 95%, 96%, 97%, 98%, 99%, or 100% identical to the polynucleotide sequence of SEQ ID NO: 11; (ii) encodes the amino acid sequence of SEQ ID NO: 10; or (iii) encodes the amino acid sequence of SEQ ID NO: 10, comprising 1, 2, or 3 amino acid modifications. In some embodiments, the P2A element additionally comprises, at its 5′ end, a polynucleotide sequence that encodes a GSG (e.g., SEQ ID Nos: 20 and 21).

[0142] As used herein, the term “T2A element” refers to a polynucleotide that (i) comprises a polynucleotide sequence at least 75%, 80%, 85%, 90%, 95%, 96%, 97%, 98%, 99%, or 100% identical to the polynucleotide sequence of SEQ ID NO: 23, or 25; (ii) encodes the amino acid sequence of SEQ ID NO: 22, or 24; or (iii) encodes the amino acid sequence of SEQ ID NO: 22, or 24, comprising 1, 2, or 3 amino acid modifications. In some embodiments, when positioned in a vector between a first polynucleotide sequence encoding a first protein and a second polynucleotide sequence encoding a second protein, the T2A element is capable of mediating the translation of the first polynucleotide sequence and the second polynucleotide sequence as two distinct polypeptides from the same mRNA molecule by preventing the synthesis of a peptide bond, e.g., between the penultimate residue (e.g., glycine) and the ultimate residue (e.g., proline) at the C terminus of the translation product of the T2A element, e.g., such that the penultimate residue (e.g., glycine) becomes the C-terminal residue of the first protein and the ultimate residue (e.g., proline) becomes the N-terminal residue of the second protein. In some embodiments, the T2A element additionally comprises, at its 5′ end, a polynucleotide sequence that encodes a furin recognition site, e.g., RAKR (SEQ ID NO: 2). In some embodiments, the T2A element additionally comprises, at its 5′ end, a polynucleotide sequence that encodes a furin recognition site, e.g., RAKRSGSG (SEQ ID NO: 4), and the T2A element can be termed an “fT2A element.” In some embodiments, an fT2A element refers to a polynucleotide that (i) comprises a polynucleotide sequence at least 75%, 80%, 85%, 90%, 95%, 96%, 97%, 98%, 99%, or 100% identical to the polynucleotide sequence of SEQ ID NO: 13; (ii) encodes the amino acid sequence of SEQ ID NO: 12; or (iii) encodes the amino acid sequence of SEQ ID NO: 12, comprising 1, 2, or 3 amino acid modifications. In some embodiments, the T2A element additionally comprises, at its 5′ end, a polynucleotide sequence that encodes a GSG (e.g., SEQ ID Nos: 24 and 25).

[0143] As used herein, the term “F2A element” refers to a polynucleotide that (i) comprises a polynucleotide sequence at least 75%, 80%, 85%, 90%, 95%, 96%, 97%, 98%, 99%, or 100% identical to the polynucleotide sequence of SEQ ID NO: 27, or 29; (ii) encodes the amino acid sequence of SEQ ID NO: 26, or 28; or (iii) encodes the amino acid sequence of SEQ ID NO: 26, or 28, comprising 1, 2, or 3 amino acid modifications. In some embodiments, when positioned in a vector between a first polynucleotide sequence encoding a first protein and a second polynucleotide sequence encoding a second protein, the F2A element is capable of mediating the translation of the first polynucleotide sequence and the second polynucleotide sequence as two distinct polypeptides from the same mRNA molecule by preventing the synthesis of a peptide bond, e.g., between the penultimate residue (e.g., glycine) and the ultimate residue (e.g., proline) at the C terminus of the translation product of the F2A element, e.g., such that the penultimate residue (e.g., glycine) becomes the C-terminal residue of the first protein and the ultimate residue (e.g., proline) becomes the N-terminal residue of the second protein. In some embodiments, the F2A element additionally comprises, at its 5′ end, a polynucleotide sequence that encodes a furin recognition site, e.g., RAKR (SEQ ID NO: 2). In some embodiments, the F2A element additionally comprises, at its 5′ end, a polynucleotide sequence that encodes a furin recognition site, e.g., RAKRSGSG (SEQ ID NO: 4), and the F2A element can be termed an “fF2A element.” In some embodiments, a fF2A element refers to a polynucleotide that (i) comprises a polynucleotide sequence at least 75%, 80%, 85%, 90%, 95%, 96%, 97%, 98%, 99%, or 100% identical to the polynucleotide sequence of SEQ ID NO: 15; (ii) encodes the amino acid sequence of SEQ ID NO: 14; or (iii) encodes the amino acid sequence of SEQ ID NO: 14, comprising 1, 2, or 3 amino acid modifications. In some embodiments, the F2A element additionally comprises, at its 5′ end, a polynucleotide sequence that encodes a GSG (e.g., SEQ ID Nos: 28 and 29).

[0144] As used herein, the term “E2A element” refers to a polynucleotide that (i) comprises a polynucleotide sequence at least 75%, 80%, 85%, 90%, 95%, 96%, 97%, 98%, 99%, or 100% identical to the polynucleotide sequence of SEQ ID NO: 31, or 33; (ii) encodes the amino acid sequence of SEQ ID NO: 30, or 32; or (iii) encodes the amino acid sequence of SEQ ID NO: 30, or 32, comprising 1, 2, or 3 amino acid modifications. In some embodiments, when positioned in a vector between a first polynucleotide sequence encoding a first protein and a second polynucleotide sequence encoding a second protein, the E2A element is capable of mediating the translation of the first polynucleotide sequence and the second polynucleotide sequence as two distinct polypeptides from the same mRNA molecule by preventing the synthesis of a peptide bond, e.g., between the penultimate residue (e.g., glycine) and the ultimate residue (e.g., proline) at the C terminus of the translation product of the E2A element, e.g., such that the penultimate residue (e.g., glycine) becomes the C-terminal residue of the first protein and the ultimate residue (e.g., proline) becomes the N-terminal residue of the second protein. In some embodiments, the E2A element additionally comprises, at its 5′ end, a polynucleotide sequence that encodes a furin recognition site, e.g., RAKR (SEQ ID NO: 2). In some embodiments, the E2A element additionally comprises, at its 5′ end, a polynucleotide sequence that encodes a furin recognition site, e.g., RAKRSGSG (SEQ ID NO: 4), and the E2A element can be termed an “fE2A element.” In some embodiments, a fE2A element refers to a polynucleotide that (i) comprises a polynucleotide sequence at least 75%, 80%, 85%, 90%, 95%, 96%, 97%, 98%, 99%, or 100% identical to the polynucleotide sequence of SEQ ID NO: 17; (ii) encodes the amino acid sequence of SEQ ID NO: 16; or (iii) encodes the amino acid sequence of SEQ ID NO: 16, comprising 1, 2, or 3 amino acid modifications. In some embodiments, the E2A element additionally comprises, at its 5′ end, a polynucleotide sequence that encodes a GSG (e.g., SEQ ID Nos: 32 and 33).

[0145] Examples of 2A elements comprising furin recognition sites at their N-terminal/5′ ends are found below in Table 2. The 2A sites themselves are broken out in Table 3.

TABLE 2
Polynucleotide sequences of exemplary furin-2A elements and amino acid
sequences of translations thereof.

| | | SEQ |
|---|---|---|
| | | ID |
| Description | Sequence | NO: |
| Translation of Furin-P2A element | RAKRSGSGATNFSLLKQAGDVEENPGP | 10 |
| Furin-P2A element | CGGGCGAAACGCTCTGGAAGCGGAGCGACCAATTTCAGCCTGC | 11 |
| | TGAAGCAGGCGGGCGATGTGGAGGAGAACCCTGGCCCA | |
| Translation of Furin-T2A element | RAKRSGSGEGRGSLLTCGDVEENPGP | 12 |
| Furin-T2A element | CGGGCGAAACGCTCTGGAAGCGGAGAGGGCAGAGGAAGTCTTC | 13 |
| | TAACATGCGGTGACGTGGAGGAGAATCCCGGCCCT | |
| Translation of Furin-F2A element | RAKRSGSGVKQTLNFDLLKLAGDVESNPGP | 14 |
| Furin-F2A element | CGGGCGAAACGCTCTGGAAGCGGAGTGAAGCAGACCCTGAATT | 15 |
| | TCGACCTGCTGAAGCTGGCCGGGGACGTGGAGAGCAACCCTGG | |
| | CCCC | |
| Translation of Furin-E2A element | RAKRSGSGQCTNYALLKLAGDVESNPGP | 16 |
| Furin-E2A element | CGGGCGAAACGCTCTGGAAGCGGACAGTGTACTAATTATGCTC | 17 |
| | TCTTGAAATTGGCTGGAGATGTTGAGAGCAACCCAGGTCCC | |

TABLE 3
Amino acid and polynucleotide sequences of exemplary 2A elements.

| | | SEQ |
|---|---|---|
| | | ID |
| Description | Amino Acid Sequence | NO: |
| P2A (exemplary amino acid | ATNFSLLKQAGDVEENPGP | 18 |
| sequence) | | |
| P2A (exemplary nucleotide | GCGACCAATTTCAGCCTGCTGAAGCAGGCGGGCGATGTGGAGG | 19 |
| sequence) | AGAACCCTGGCCCA | |
| P2A (with flanking residues) | GSGATNFSLLKQAGDVEENPGP | 20 |
| (exemplary amino acid sequence) | | |
| P2A (with flanking residues) | GGCTCCGGAGCGACCAATTTCAGCCTGCTGAAGCAGGCGGGCG | 21 |
| (exemplary nucleotide sequence) | ATGTGGAGGAGAACCCTGGCCCA | |
| T2A (exemplary amino acid | EGRGSLLTCGDVEENPGP | 22 |
| sequence) | | |
| T2A (exemplary nucleotide | GAGGGCAGAGGAAGTCTTCTAACATGCGGTGACGTGGAGGAGA | 23 |
| sequence) | ATCCCGGCCCT | |
| T2A (with flanking residues) | GSGEGRGSLLTCGDVEENPGP | 24 |
| (exemplary amino acid sequence) | | |
| T2A (with flanking residues) | GGCTCCGGAGAGGGCAGAGGAAGTCTTCTAACATGCGGTGACG | 25 |
| (exemplary nucleotide sequence) | TGGAGGAGAATCCCGGCCCT | |
| F2A (exemplary amino acid | VKQTLNFDLLKLAGDVESNPGP | 26 |
| sequence) | | |
| F2A (exemplary nucleotide | GTGAAGCAGACCCTGAATTTCGACCTGCTGAAGCTGGCCGGGG | 27 |
| sequence) | ACGTGGAGAGCAACCCTGGCCCC | |
| F2A (with flanking residues) | GSGVKQTLNFDLLKLAGDVESNPGP | 28 |
| (exemplary amino acid sequence) | | |
| F2A (with flanking residues) | GGCTCCGGAGTGAAGCAGACCCTGAATTTCGACCTGCTGAAGC | 29 |
| (exemplary nucleotide sequence) | TGGCCGGGGACGTGGAGAGCAACCCTGGCCCC | |
| E2A (exemplary amino acid | QCTNYALLKLAGDVESNPGP | 30 |
| sequence) | | |
| E2A (exemplary nucleotide | CAGTGTACTAATTATGCTCTCTTGAAATTGGCTGGAGATGTTG | 31 |
| sequence) | AGAGCAACCCAGGTCCC | |
| E2A (with flanking residues) | GSGQCTNYALLKLAGDVESNPGP | 32 |
| (exemplary amino acid sequence) | | |
| E2A (with flanking residues) | GGCTCCGGACAGTGTACTAATTATGCTCTCTTGAAATTGGCTG | 33 |
| (exemplary nucleotide sequence) | GAGATGTTGAGAGCAACCCAGGTCCC | |

[0146] As used herein, the terms “inverted terminal repeat,” “ITR,” “inverted repeat/direct repeat,” and “IR/DR” are used interchangeably and refer to a polynucleotide sequence, e.g., of about 230 nucleotides (e.g., 220, 221, 222, 223, 224, 225, 226, 227, 228, 229, 230, 231, 232, 233, 234, 235, 236, 237, 238, 239, or 240 nucleotides), flanking (e.g., with or without an intervening polynucleotide sequence) one end of an expression cassette (e.g., a polycistronic expression cassette) that can be cleaved by a transposase polypeptide when used in combination with a corresponding, e.g., reverse-complementary (e.g., perfectly or imperfectly reverse-complementary) polynucleotide sequence, e.g., of about 230 nucleotides (e.g., 220, 221, 222, 223, 224, 225, 226, 227, 228, 229, 230, 231, 232, 233, 234, 235, 236, 237, 238, 239, or 240 nucleotides), flanking (e.g., with or without an intervening polynucleotide sequence) the opposite end of the expression cassette (e.g., a polycistronic expression cassette) (e.g., as described in Cui et al., J. Mol. Biol. 2002; 318(5):1221-35, the contents of which are incorporated by reference in their entirety herein). In some embodiments, an ITR, e.g., an ITR of a DNA transposon (e.g., a Sleeping Beauty transposon, a piggyBac transposon, a TcBuster transposon, and a Tol2 transposon) contains two direct repeats (“DRs”), e.g., imperfect direct repeats, e.g., of about 30 nucleotides (e.g., 25, 26, 27, 28, 29, 30, 31, 32, 33, 34, or 35 nucleotides), located at each end of the ITR. The terms “ITR” and “DR,” when used in reference to a single- or double-stranded DNA vector, refer to the DNA sequence of the sense strand. A transposase polypeptide may recognize the sense strand and/or the antisense strand of DNA.

[0147] As used herein, the term “Left ITR,” when used in reference to a linear single- or double-stranded DNA vector, refers to the ITR positioned 5′ of the polycistronic expression cassette. As used herein, the term “Right ITR,” when used in reference to a linear single- or double-stranded DNA vector, refers to the ITR positioned 3′ of the polycistronic expression cassette. When a circular vector is used, the Left ITR is closer than the Right ITR to the 5′ end of the polycistronic expression cassette, and the Right ITR is closer than the Left ITR to the 3′ end of the polycistronic expression cassette.

[0148] As used herein, the term “operably linked” refers to a linkage of polynucleotide sequence elements or amino acid sequence elements in a functional relationship. For example, a polynucleotide sequence is operably linked when it is placed into a functional relationship with another polynucleotide sequence. In some embodiments, a transcription regulatory polynucleotide sequence e.g., a promoter, enhancer, or other expression control element is operably linked to a polynucleotide sequence that encodes a protein if it affects the transcription of the polynucleotide sequence that encodes the protein.

[0149] The term “polynucleotide” as used herein refers to a polymer of DNA or RNA. The polynucleotide sequence can be single-stranded or double-stranded; contain natural, non-natural, or altered nucleotides; and contain a natural, non-natural, or altered internucleotide linkage, such as a phosphoroamidate linkage or a phosphorothioate linkage, instead of the phosphodiester found between the nucleotides of an unmodified polynucleotide sequence. Polynucleotide sequences include, but are not limited to, all polynucleotide sequences which are obtained by any means available in the art, including, without limitation, recombinant means, e.g., the cloning of polynucleotide sequences from a recombinant library or a cell genome, using ordinary cloning technology and polymerase chain reaction, and the like, and by synthetic means.

[0150] The terms “protein” and “polypeptide” are used interchangeably herein and refer to a polymer of amino acids connected by one or more peptide bonds. As used herein, “amino acid sequence” refers to the information describing the relative order and identity of amino acid residues which make up a polypeptide.

[0151] The term “functional variant” as used herein in reference to a protein or polypeptide refers to a protein that comprises at least one amino acid modification (e.g., a substitution, deletion, addition) compared to the amino acid sequence of a reference protein, that retains at least one particular function. In some embodiments, the reference protein is a wild type protein. For example, a functional variant of an IL-15 protein can refer to an IL-15 protein comprising an amino acid substitution compared to a wild type IL-15 protein that retains the ability to bind the IL-15 receptor a chain (IL-15Rα). Not all functions of the reference wild type protein need be retained by the functional variant of the protein. In some instances, one or more functions are selectively reduced or eliminated.

[0152] The term “functional fragment” as used herein in reference to a protein or polypeptide refers to a fragment of a reference protein that retains at least one particular function. For example, a functional fragment of an IL-15 protein can refer to a fragment of the protein that retains the ability to specifically bind IL-15Rα. Not all functions of the reference protein need be retained by a functional fragment of the protein. In some instances, one or more functions are selectively reduced or eliminated.

[0153] As used herein, the term “modification,” with reference to a polynucleotide sequence, refers to a polynucleotide sequence that comprises at least one substitution, alteration, inversion, addition, or deletion of nucleotide compared to a reference polynucleotide sequence. As used herein, the term “modification,” with reference to an amino acid sequence, refers to an amino acid sequence that comprises at least one substitution, alteration, inversion, addition, or deletion of an amino acid residue compared to a reference amino acid sequence.

[0154] As used herein, the term “derived from,” with reference to a polynucleotide sequence, refers to a polynucleotide sequence that has at least 85% sequence identity to a reference naturally occurring nucleic acid sequence from which it is derived. The term “derived from,” with reference to an amino acid sequence, refers to an amino acid sequence that has at least 85% sequence identity to a reference naturally occurring amino acid sequence from which it is derived. The term “derived from” as used herein does not denote any specific process or method for obtaining the polynucleotide or amino acid sequence. For example, the polynucleotide or amino acid sequence can be chemically synthesized.

[0155] As used herein, the term “linked to” refers to covalent or noncovalent binding between two molecules or moieties. The skilled worker will appreciate that when a first molecule or moiety is linked to a second molecule or moiety, the linkage need not be direct, but instead, can be via an intervening molecule or moiety.

[0156] As used herein, the term “marker protein” or “marker polypeptide” are used interchangeably and refer to a protein or polypeptide that can be expressed on the surface of a cell, which can be utilized to mark or deplete cells expressing the marker protein or polypeptide. In some embodiments, depletion of cells expressing the marker protein or polypeptide is performed through the administration of a molecule that specifically binds the marker protein or polypeptide (e.g., an antibody that mediates antibody dependent cellular cytotoxicity).

[0157] As used herein, the term “immune effector cell” refers to a cell that is involved in the promotion of an immune effector function. Examples of immune effector cells include, but are not limited to, T cells (e.g., alpha/beta T cells and gamma/delta T cells, CD4⁺ T cells, CD8⁺ T cells, natural killer T (NKT) cells), natural killer (NK) cells, B cells, mast cells, and myeloid-derived phagocytes.

[0158] As used herein, the term “immune effector function” refers to a specialized function of an immune effector cell. The effector function ofany given immune effector cell can be different. For example, an effector function of a CDA+ T cell is cytolytic activity, and an effector function of a CD4+ T cell is secretion of a cytokine.

### 1.2 T Cell Receptors

[0159] In one aspect, the instant disclosure provides electroporated T cells that express TCRs via a polycistronic expression cassette. In certain embodiments, the TCR comprises a T cell receptor (TCR) alpha chain comprising an alpha chain variable (Vα) region and an alpha chain constant (Cα) region and a TCR beta chain comprising a beta chain variable (Vβ) region and a beta chain constant (Cβ). The amino acid sequences of constant domains comprised in the TCRs disclosed herein are shown in Tables 4 and 5 below.

TABLE 4
Amino acid sequences of TCR Cα regions.

| | | SEQ |
|---|---|---|
| | | ID |
| Description | Sequence | NO: |
| Cα (murine, | XIQNPEPAVYQLKDPRSQDSTLCLFTDFDSQINVPKTMESGTFITDKXVLDM | 40 |
| degenerate) | KAMDSKSNGAIAWSNQTSFTCQDIFKETNATYPSSDVPCDATLTEKSFETDM | |
| | NLNFQNLXVXXLRILLLKVAGENLLMTLRLWSS | |
| | X at position 1 is Asn, Asp, His, or Tyr; | |
| | X at position 48 is Thr or Cys; | |
| | X at position 112 is Ser, Ala, Vαl, Leu, Ile, Pro, Phe, Met, or Trp; | |
| | X at position 114 is Met, Ala, Vαl, Leu, Ile, Pro, Phe, or Trp; | |
| | X at position 115 is Gly, Ala, Vαl, Leu, Ile, Pro, Phe, Met, or Trp | |
| Cα (murine, | NNNATCCAGAATCCCGAGCCTGCGGTGTACCAGCTGAAGGACCCCCGCTCTC | 57 |
| degenerate) | AGGATAGCACACTGTGCCTGTTCACCGACTTTGATAGCCAGATCAACGTGCC | |
| (exemplary nucleotide | TAAAACAATGGAGTCCGGCACCTTCATCACCGACAAGNNNGTGCTGGATATG | |
| sequence) | AAAGCGATGGACTCCAAGTCTAACGGCGCGATCGCGTGGTCCAATCAGACAT | |
| | CTTTCACCTGCCAGGATATCTTCAAGGAGACAAACGCGACCTATCCTTCCTC | |
| | TGACGTGCCATGTGATGCGACACTGACCGAGAAGAGCTTCGAGACAGACATG | |
| | AACCTGAATTTTCAGAATCTGNNNGTCNNNNNNCTGAGAATCCTGCTGCTGA | |
| | AGGTGGCGGGCTTTAATCTGCTGATGACACTGCGGCTGTGGAGTTCC | |
| | NNN at positions 1-3 make up a codon that encodes Asn, Asp, His, or Tyr; | |
| | NNN at positions 142-144 make up a codon that encodes Thr or Cys; | |
| | NNN at positions 334-336 make up a codon that encodes Ser, Ala, Vαl, Leu, | |
| | Ile, Pro, Phe, Met, or Trp; | |
| | NNN at positions 340-342 make up a codon that encodes Met, Ala, Vαl, Leu, | |
| | Ile, Pro, Phe, or Trp; | |
| | NNN at positions 343-345 make up a codon that encodes Gly, Ala, Vαl, Leu, | |
| | Ile, Pro, Phe, Met, or Trp | |
| Cα (murine, cysteine- | NIQNPEPAVYQLKDPRSQDSTLCLFTDFDSQINVPKTMESGTFITDKCVLDM | 41 |
| and LIV-substituted) | KAMDSKSNGAIAWSNQTSFTCQDIFKETNATYPSSDVPCDATLTEKSFETDM | |
| | NLNFQNLLVIVLRILLLKVAGFNLLMTLRLWSS | |
| Cα (murine, cysteine- | AACATCCAGAATCCCGAGCCTGCGGTGTACCAGCTGAAGGACCCCCGCTCTC | 55 |
| and LIV-substituted) | AGGATAGCACACTGTGCCTGTTCACCGACTTTGATAGCCAGATCAACGTGCC | |
| (exemplary nucleotide | TAAAACAATGGAGTCCGGCACCTTCATCACCGACAAGTGCGTGCTGGATATG | |
| sequence) | AAAGCGATGGACTCCAAGTCTAACGGCGCGATCGCGTGGTCCAATCAGACAT | |
| | CTTTCACCTGCCAGGATATCTTCAAGGAGACAAACGCGACCTATCCTTCCTC | |
| | TGACGTGCCATGTGATGCGACACTGACCGAGAAGAGCTTCGAGACAGACATG | |
| | AACCTGAATTTTCAGAATCTGCTGGTCATCGTGCTGAGAATCCTGCTGCTGA | |
| | AGGTGGCGGGCTTTAATCTGCTGATGACACTGCGGCTGTGGAGTTCC | |
| Cα (murine, LIV | NIQNPEPAVYQLKDPRSQDSTLCLFTDFDSQINVPKTMESGTFITDKTVLDM | 42 |
| substituted) | KAMDSKSNGAIAWSNQTSFTCQDIFKETNATYPSSDVPCDATLTEKSFETDM | |
| | NLNFQNLLVIVLRILLLKVAGFNLLMTLRLWSS | |
| Cα (murine, LIV | AACATCCAGAATCCCGAGCCTGCGGTGTACCAGCTGAAGGACCCCCGCTCTC | 58 |
| substituted) | AGGATAGCACACTGTGCCTGTTCACCGACTTTGATAGCCAGATCAACGTGCC | |
| (exemplary nucleotide | TAAAACAATGGAGTCCGGCACCTTCATCACCGACAAGACCGTGCTGGATATG | |
| sequence) | AAAGCGATGGACTCCAAGTCTAACGGCGCGATCGCGTGGTCCAATCAGACAT | |
| | CTTTCACCTGCCAGGATATCTTCAAGGAGACAAACGCGACCTATCCTTCCTC | |
| | TGACGTGCCATGTGATGCGACACTGACCGAGAAGAGCTTCGAGACAGACATG | |
| | AACCTGAATTTTCAGAATCTGCTGGTCATCGTGCTGAGAATCCTGCTGCTGA | |
| | AGGTGGCGGGCTTTAATCTGCTGATGACACTGCGGCTGTGGAGTTCC | |
| Cα (murine, cysteine- | NIQNPEPAVYQLKDPRSQDSTLCLFTDFDSQINVPKTMESGTFITDKCVLDM | 43 |
| substituted) | KAMDSKSNGAIAWSNQTSFTCQDIFKETNATYPSSDVPCDATLTEKSFETDM | |
| | NLNFQNLSVMGLRILLLKVAGFNLLMTLRLWSS | |
| Cα (murine, wild type) | NIQNPEPAVYQLKDPRSQDSTLCLFTDFDSQINVPKTMESGTFITDKTVLDM | 44 |
| | KAMDSKSNGAIAWSNQTSFTCQDIFKETNATYPSSDVPCDATLTEKSFETDM | |
| | NLNFQNLSVMGLRILLLKVAGFNLLMTLRLWSS | |
| Cα (human, | XIQNPDPAVYQLRDSKSSDKSVCLFTDFDSQTNVSQSKDSDVYITDKXVLDM | 45 |
| degenerate) | RSMDFKSNSAVAWSNKSDFACANAFNNSIIPEDTFFPSPESSCDVKLVEKSF | |
| | ETDTNLNFQNLXVXXFRILLLKVAGFNLLMTLRLWSS | |
| | X at position 1 is Asn, Asp, His, or Tyr | |
| | X at position 48 is Thr or Cys; | |
| | X at position 116 is Ser, Ala, Vαl, Leu, Ile, Pro, Phe, Met, or Trp; | |
| | X at position 118 is Met, Ala, Vαl, Leu, Ile, Pro, Phe, or Trp; | |
| | X at position 119 is Gly, Ala, Vαl, Leu, Ile, Pro, Phe, Met, or Trp | |
| Cα (human, cysteine- | XIQNPDPAVYQLRDSKSSDKSVCLFTDFDSQTNVSQSKDSDVYITDKCVLDM | 46 |
| and LIV-substituted; | RSMDFKSNSAVAWSNKSDFACANAFNNSIIPEDTFFPSPESSCDVKLVEKSF | |
| degenerate at position | ETDTNLNFQNLLVIVFRILLLKVAGFNLLMTLRLWSS | |
| 1) | X at position 1 is Asn, Asp, His, or Tyr | |
| Cα (human, LIV- | XIQNPDPAVYQLRDSKSSDKSVCLFTDFDSQTNVSQSKDSDVYITDKTVLDM | 47 |
| substituted; degenerate | RSMDFKSNSAVAWSNKSDFACANAFNNSIIPEDTFFPSPESSCDVKLVEKSF | |
| at position 1) | ETDTNLNFQNLLVIVFRILLLKVAGFNLLMTLRLWSS | |
| | X at position 1 is Asn, Asp, His, or Tyr | |
| Cα (human, cysteine- | XIQNPDPAVYQLRDSKSSDKSVCLFTDFDSQTNVSQSKDSDVYITDKCVLDM | 48 |
| substituted; degenerate | RSMDFKSNSAVAWSNKSDFACANAFNNSIIPEDTFFPSPESSCDVKLVEKSF | |
| at position 1) | ETDTNLNFQNLSVIGFRILLLKVAGFNLLMTLRLWSS | |
| | X at position 1 is Asn, Asp, His, or Tyr | |
| Cα (human, wild type; | XIQNPDPAVYQLRDSKSSDKSVCLFTDFDSQTNVSQSKDSDVYITDKTVLDM | 49 |
| degenerate at position | RSMDFKSNSAVAWSNKSDFACANAFNNSIIPEDTFFPSPESSCDVKLVEKSF | |
| 1) | ETDTNLNFQNLSVIGFRILLLKVAGFNLLMTLRLWSS | |
| | X at position 1 is Asn, Asp, His, or Tyr | |

TABLE 5
Amino acid sequences of TCR Cβ regions.

| | | SEQ |
|---|---|---|
| | | ID |
| Description | Sequence | NO: |
| Cβ (murine, | EDLRNVTPPKVSLFEPSKAEIANKQKATLVCLARGFFPDHVELSWWVNGKEV | 50 |
| degenerate) | HSGVXTDPQAYKESNYSYCLSSRLRVSATFWHNPRNHFRCQVQFHGLSEEDK | |
| | WPEGSPKPVTQNISAEAWGRADCGITSASYQQGVLSATILYEILLGKATLYA | |
| | VLVSTLVVMAMVKRKNS | |
| | X at position 57 is Ser or Cys | |
| Cβ (murine, | GAGGACCTGAGGAACGTGACCCCACCTAAAGTGAGCCTGTTCGAGCCATCCA | 59 |
| degenerate) | AGGCGGAGATCGCGAATAAGCAGAAAGCGACCCTGGTGTGCCTGGCGAGGGG | |
| (exemplary nucleotide | CTTCTTTCCCGATCACGTGGAGCTGTCCTGGTGGGTGAACGGCAAAGAGGTG | |
| sequence) | CACTCTGGCGTGNNNACAGACCCTCAGGCGTACAAGGAGAGCAATTACTCCT | |
| | ATTGTCTGTCTAGCAGACTGAGGGTGAGCGCGACCTTTTGGCACAACCCCCG | |
| | GAATCACTTCCGCTGCCAGGTGCAGTTTCACGGCCTGTCCGAGGAGGATAAA | |
| | TGGCCTGAGGGCTCTCCAAAGCCCGTGACACAGAATATCAGCGCGGAGGCGT | |
| | GGGGAAGAGCGGACTGTGGCATTACAAGCGCGTCCTATCAGCAGGGCGTGCT | |
| | GTCCGCGACCATCCTGTACGAGATTCTGCTGGGCAAGGCGACACTGTATGCG | |
| | GTGCTGGTGTCCACCCTGGTGGTCATGGCGATGGTGAAGAGGAAAAACTCT | |
| | NNN at positions 169-171 make up a codon that encodes Ser or Cys | |
| Cβ (murine, cysteine- | EDLRNVTPPKVSLFEPSKAEIANKQKATLVCLARGFFPDHVELSWWVNGKEV | 51 |
| substituted) | HSGVCTDPQAYKESNYSYCLSSRLRVSATFWHNPRNHFRCQVQFHGLSEEDK | |
| | WPEGSPKPVTQNISAEAWGRADCGITSASYQQGVLSATILYEILLGKATLYA | |
| | VLVSTLVVMAMVKRKNS | |
| Cβ (murine, cysteine- | GAGGACCTGAGGAACGTGACCCCACCTAAAGTGAGCCTGTTCGAGCCATCCA | 56 |
| substituted) | AGGCGGAGATCGCGAATAAGCAGAAAGCGACCCTGGTGTGCCTGGCGAGGGG | |
| (exemplary nucleotide | CTTCTTTCCCGATCACGTGGAGCTGTCCTGGTGGGTGAACGGCAAAGAGGTG | |
| sequence) | CACTCTGGCGTGTGCACAGACCCTCAGGCGTACAAGGAGAGCAATTACTCCT | |
| | ATTGTCTGTCTAGCAGACTGAGGGTGAGCGCGACCTTTTGGCACAACCCCCG | |
| | GAATCACTTCCGCTGCCAGGTGCAGTTTCACGGCCTGTCCGAGGAGGATAAA | |
| | TGGCCTGAGGGCTCTCCAAAGCCCGTGACACAGAATATCAGCGCGGAGGCGT | |
| | GGGGAAGAGCGGACTGTGGCATTACAAGCGCGTCCTATCAGCAGGGCGTGCT | |
| | GTCCGCGACCATCCTGTACGAGATTCTGCTGGGCAAGGCGACACTGTATGCG | |
| | GTGCTGGTGTCCACCCTGGTGGTCATGGCGATGGTGAAGAGGAAAAACTCT | |
| Cβ (murine, wild type) | EDLRNVTPPKVSLFEPSKAEIANKQKATLVCLARGFFPDHVELSWWVNGKEV | 52 |
| | HSGVSTDPQAYKESNYSYCLSSRLRVSATFWHNPRNHFRCQVQFHGLSEEDK | |
| | WPEGSPKPVTQNISAEAWGRADCGITSASYQQGVLSATILYEILLGKATLYA | |
| | VLVSTLVVMAMVKRKNS | |
| Cβ (human, | EDLKNVFPPEVAVFEPSEAEISHTQKATLVCLATGFYPDHVELSWWVNGKEV | 53 |
| degenerate) | HSGVXTDPQPLKEQPALNDSRYCLSSRLRVSATFWQNPRNHFRCQVQFYGLS | |
| | ENDEWTQDRAKPVTQIVSAEAWGRADCGFTSESYQQGVLSATILYEILLGKA | |
| | TLYAVLVSALVLMAMVKRKDSRG | |
| | X at position 57 is Ser or Cys | |
| Cβ (human, cysteine- | EDLKNVFPPEVAVFEPSEAEISHTQKATLVCLATGFYPDHVELSWWVNGKEV | 54 |
| substituted) | HSGVCTDPQPLKEQPALNDSRYCLSSRLRVSATFWQNPRNHFRCQVQFYGLS | |
| | ENDEWTQDRAKPVTQIVSAEAWGRADCGFTSESYQQGVLSATILYEILLGKA | |
| | TLYAVLVSALVLMAMVKRKDSRG | |
| Cβ (human, wild type) | EDLKNVFPPEVAVFEPSEAEISHTQKATLVCLATGFYPDHVELSWWVNGKEV | 60 |
| | HSGVSTDPQPLKEQPALNDSRYCLSSRLRVSATFWQNPRNHFRCQVQFYGLS | |
| | ENDEWTQDRAKPVTQIVSAEAWGRADCGFTSESYQQGVLSATILYEILLGKA | |
| | TLYAVLVSALVLMAMVKRKDSRG | |

[0160] As used herein, “LIV-substituted” refers to a Cα sequence disclosed herein which, relative to SEQ ID NO: 40, comprises a leucine residue at position 112, an isoleucine residue at position 114, and a valine residue at position 115. See, for example, SEQ ID Nos: 41 and 42. In some embodiments, and independent of the LIV-substitutions a Cα sequence disclosed herein can comprise a cysteine at position 48, replacing the threonine residue. (Compare SEQ ID Nos: 40-44). In some embodiments, the Cβ sequence disclosed herein has a substitution of the serine at residue 57 with cysteine. This is shown in SEQ ID Nos: 50 and 51.

[0161] Tumor Protein p53 (also referred to as “p53”) acts as a tumor suppressor by, for example, regulating cell division. In some embodiments, wild type full-length p53 has the amino acid sequence of SEQ ID NO: 340, shown below.

(SEQ ID NO: 340)
[sequence omitted]

[0162] Kirsten rat sarcoma viral oncogene homolog (KRAS), also referred to as GTPase Kras, V-Ki-Ras2 Kirsten rat sarcoma viral oncogene, or KRAS2, is a member of the small GTPase superfamily. There are two transcript variants of KRAS: KRAS variant A and KRAS variant B. Hereinafter, references to “KRAS” (mutated or unmutated) refer to both variant A and variant B, unless specified otherwise. In some embodiments, wild type KRAS variant A has the amino acid sequence of SEQ ID NO: 341 and wild type KRAS variant B has the amino acid sequence of SEQ ID NO: 342, both shown below.

(SEQ ID NO: 341)
[sequence omitted]
(SEQ ID NO: 342)
[sequence omitted]

[0163] EGFR (also referred to as ERBB1 or HER1) is a transmembrane glycoprotein that belongs to the receptor tyrosine kinase (RTK) super-family of cell surface receptors, which mediate cell signaling by extra-cellular growth factors. Examples of wild type (WT), unmutated human EGFR amino acid sequences include those disclosed in GenBank Accession Nos. NP_001 333826.1 (isoform e precursor), NP_001333827.1 (isoform f precursor), NP_001333828.1 (isoform g precursor), NP_001333829.1 (isoform h precursor), NP_001333870.1 (isoform i precursor), NP_005219.2 (isoform a precursor), NP_958439.1 (isoform b precursor), NP_958440.1 (isoform c precursor), and NP_958441.1 (isoform d precursor). In some embodiments, wild type EGFR has the amino acid sequence of SEQ ID NO: 343

(SEQ ID NO: 343)
[sequence omitted]

[0164] The amino acid sequences of exemplary TCRs are set forth in Table 6 herein.

TABLE 6A
Amino acid sequences of TCR001.

| | | SEQ |
|---|---|---|
| | | ID |
| Description | Sequence | NO: |
| CDR1α | NYSPAY | 1001 |
| CDR2α | IRENEKE | 1002 |
| CDR3α | ALDIYPHDMR | 1003 |
| Vα without signal | QKIEQNSEALNIQEGKTATLTCNYTNYSPAYLQWYRQDPGRGPVFLLLIREN | 1004 |
| peptide (SignalP) | EKEKRKERLKVTFDTTLKQSLFHITASQPADSATYLCALDIYPHDMRFGAGT | |
| | RLTVKP | |
| Vα without signal | SQKIEQNSEALNIQEGKTATLTCNYTNYSPAYLQWYRQDPGRGPVFLLLIRE | 1005 |
| peptide (IMGT) | NEKEKRKERLKVTFDTTLKQSLFHITASQPADSATYLCALDIYPHDMRFGAG | |
| | TRLTVKP | |
| Vα | MXSFLGGVLLILWLQVDWVKSQKIEQNSEALNIQEGKTATLTCNYTNYSPAY | 1006 |
| | LQWYRQDPGRGPVFLLLIRENEKEKRKERLKVTFDTTLKQSLFHITASQPAD | 1007 |
| | SATYLCALDIYPHDMRFGAGTRLTVKP | |
| | (X = any amino acid) | |
| α chain with WT signal | MESFLGGVLLILWLQVDWVKSQKIEQNSEALNIQEGKTATLTCNYTNYSPAY | 1008 |
| peptide, Cα | LQWYRQDPGRGPVFLLLIRENEKEKRKERLKVTFDTTLKQSLFHITASQPAD | |
| (substituted) | SATYLCALDIYPHDMRFGAGTRLTVKPNIQNPEPAVYQLKDPRSQDSTLCLF | |
| | TDFDSQINVPKTMESGTFITDKCVLDMKAMDSKSNGAIAWSNQTSFTCQDIF | |
| | KETNATYPSSDVPCDATLTEKSFETDMNLNFQNLLVIVLRILLLKVAGFNLL | |
| | MTLRLWSS | |
| α chain with | MASFLGGVLLILWLQVDWVKSQKIEQNSEALNIQEGKTATLTCNYTNYSPAY | 1009 |
| alternative signal | LQWYRQDPGRGPVFLLLIRENEKEKRKERLKVTFDTTLKQSLFHITASQPAD | |
| peptide, Cα | SATYLCALDIYPHDMRFGAGTRLTVKPNIQNPEPAVYQLKDPRSQDSTLCLF | |
| (substituted) | TDFDSQINVPKTMESGTFITDKCVLDMKAMDSKSNGAIAWSNQTSFTCQDIF | |
| | KETNATYPSSDVPCDATLTEKSFETDMNLNFQNLLVIVLRILLLKVAGFNLL | |
| | MTLRLWSS | |
| α chain with | MHSFLGGVLLILWLQVDWVKSQKIEQNSEALNIQEGKTATLTCNYTNYSPAY | 1010 |
| alternative signal | LQWYRQDPGRGPVFLLLIRENEKEKRKERLKVTFDTTLKQSLFHITASQPAD | |
| peptide, Cα | SATYLCALDIYPHDMRFGAGTRLTVKPNIQNPEPAVYQLKDPRSQDSTLCLF | |
| (substituted) | TDFDSQINVPKTMESGTFITDKCVLDMKAMDSKSNGAIAWSNQTSFTCQDIF | |
| | KETNATYPSSDVPCDATLTEKSFETDMNLNFQNLLVIVLRILLLKVAGFNLL | |
| | MTLRLWSS | |
| CDR1β | SGHAT | 2001 |
| CDR2β | FQNNGV | 2002 |
| CDR3β | ASSLDPGDTGELF | 2003 |
| Vβ without signal | GVAQSPRYKIIEKRQSVAFWCNPISGHATLYWYQQILGQGPKLLIQFQNNGV | 2004 |
| peptide (SignalP) | VDDSQLPKDRFSAERLKGVDSTLKIQPAKLEDSAVYLCASSLDPGDTGELFF | |
| | GEGSRLTVL | |
| Vβ without signal | EAGVAQSPRYKIIEKRQSVAFWCNPISGHATLYWYQQILGQGPKLLIQFQNN | 2005 |
| peptide (IMGT) | GVVDDSQLPKDRFSAERLKGVDSTLKIQPAKLEDSAVYLCASSLDPGDTGEL | |
| | FFGEGSRLTVL | |
| Vβ | MXTRLLCWAALCLLGAELTEAGVAQSPRYKIIEKRQSVAFWCNPISGHATLY | 2006 |
| | WYQQILGQGPKLLIQFQNNGVVDDSQLPKDRFSAERLKGVDSTLKIQPAKLE | 2007 |
| | DSAVYLCASSLDPGDTGELFFGEGSRLTVL | |
| | (X = any amino acid) | |
| β chain with WT signal | MGTRLLCWAALCLLGAELTEAGVAQSPRYKIIEKRQSVAFWCNPISGHATLY | 2008 |
| peptide, Cβ | WYQQILGQGPKLLIQFQNNGVVDDSQLPKDRFSAERLKGVDSTLKIQPAKLE | |
| (substituted) | DSAVYLCASSLDPGDTGELFFGEGSRLTVLEDLRNVTPPKVSLFEPSKAEIA | |
| | NKQKATLVCLARGFFPDHVELSWWVNGKEVHSGVCTDPQAYKESNYSYCLSS | |
| | RLRVSATFWHNPRNHFRCQVQFHGLSEEDKWPEGSPKPVTQNISAEAWGRAD | |
| | CGITSASYQQGVLSATILYEILLGKATLYAVLVSTLVVMAMVKRKNS | |
| β chain with alternative | MATRLLCWAALCLLGAELTEAGVAQSPRYKIIEKRQSVAFWCNPISGHATLY | 2009 |
| signal peptide, Cβ | WYQQILGQGPKLLIQFQNNGVVDDSQLPKDRFSAERLKGVDSTLKIQPAKLE | |
| (substituted) | DSAVYLCASSLDPGDTGELFFGEGSRLTVLEDLRNVTPPKVSLFEPSKAEIA | |
| | NKQKATLVCLARGFFPDHVELSWWVNGKEVHSGVCTDPQAYKESNYSYCLSS | |
| | RLRVSATFWHNPRNHFRCQVQFHGLSEEDKWPEGSPKPVTQNISAEAWGRAD | |
| | CGITSASYQQGVLSATILYEILLGKATLYAVLVSTLVVMAMVKRKNS | |
| β chain with alternative | MHTRLLCWAALCLLGAELTEAGVAQSPRYKIIEKRQSVAFWCNPISGHATLY | 2010 |
| signal peptide, Cβ | WYQQILGQGPKLLIQFQNNGVVDDSQLPKDRFSAERLKGVDSTLKIQPAKLE | |
| (substituted) | DSAVYLCASSLDPGDTGELFFGEGSRLTVLEDLRNVTPPKVSLFEPSKAEIA | |
| | NKQKATLVCLARGFFPDHVELSWWVNGKEVHSGVCTDPQAYKESNYSYCLSS | |
| | RLRVSATFWHNPRNHFRCQVQFHGLSEEDKWPEGSPKPVTQNISAEAWGRAD | |
| | CGITSASYQQGVLSATILYEILLGKATLYAVLVSTLVVMAMVKRKNS | |

[0165] In some embodiments, TCR001 interacts with and/or is specific for a peptide from the tumor protein p53 (p53). In some embodiments, the peptide is from a neoantigen of p53 and has the amino acid change R175H (in which position 175 of the p53 protein is mutated from Arg to His). In some embodiments, TCR001 interacts with and/or is specific for the neoantigen in the context of HLA-A*02:01, as described in International Publication No. WO 2019/067243, incorporated herein by reference in its entirety.

TABLE 6B
Amino acid sequences of TCR002.

| | | SEQ |
|---|---|---|
| | | ID |
| Description | Sequence | NO: |
| CDR1α | DSASNY | 1011 |
| CDR2α | IRSNVGE | 1012 |
| CDR3α | AASKSAIMVVLQTSSSL | 1013 |
| Vα without signal | ENVEQHPSTLSVQEGDSAVIKCTYSDSASNYFPWYKQELGKGPQLIIDIRSN | 1014 |
| peptide (SignalP) | VGEKKDQRIAVTLNKTAKHFSLHITETQPEDSAVYFCAASKSAIMVVLQTSS | |
| | SLELALCLLSSQV | |
| Vα without signal | GENVEQHPSTLSVQEGDSAVIKCTYSDSASNYFPWYKQELGKGPQLIIDIRS | 1015 |
| peptide (IMGT) | NVGEKKDQRIAVTLNKTAKHFSLHITETQPEDSAVYFCAASKSAIMVVLQTS | |
| | SSLELALCLLSSQV | |
| Vα | MXSIRAVFIFLWLQLDLVNGENVEQHPSTLSVQEGDSAVIKCTYSDSASNYF | 1016 |
| | PWYKQELGKGPQLIIDIRSNVGEKKDQRIAVTLNKTAKHFSLHITETQPEDS | 1017 |
| | AVYFCAASKSAIMVVLQTSSSLELALCLLSSQV | |
| | (X = any amino acid) | |
| α chain with WT signal | MTSIRAVFIFLWLQLDLVNGENVEQHPSTLSVQEGDSAVIKCTYSDSASNYF | 1018 |
| peptide, Cα | PWYKQELGKGPQLIIDIRSNVGEKKDQRIAVTLNKTAKHFSLHITETQPEDS | |
| (substituted) | AVYFCAASKSAIMVVLQTSSSLELALCLLSSQVNIQNPEPAVYQLKDPRSQD | |
| | STLCLFTDFDSQINVPKTMESGTFITDKCVLDMKAMDSKSNGAIAWSNQTSF | |
| | TCQDIFKETNATYPSSDVPCDATLTEKSFETDMNLNFQNLLVIVLRILLLKV | |
| | AGFNLLMTLRLWSS | |
| α chain with | MASIRAVFIFLWLQLDLVNGENVEQHPSTLSVQEGDSAVIKCTYSDSASNYF | 1019 |
| alternative signal | PWYKQELGKGPQLIIDIRSNVGEKKDQRIAVTLNKTAKHFSLHITETQPEDS | |
| peptide, Cα | AVYFCAASKSAIMVVLQTSSSLELALCLLSSQVNIQNPEPAVYQLKDPRSQD | |
| (substituted) | STLCLFTDFDSQINVPKTMESGTFITDKCVLDMKAMDSKSNGAIAWSNQTSF | |
| | TCQDIFKETNATYPSSDVPCDATLTEKSFETDMNLNFQNLLVIVLRILLLKV | |
| | AGFNLLMTLRLWSS | |
| α chain with | MHSIRAVFIFLWLQLDLVNGENVEQHPSTLSVQEGDSAVIKCTYSDSASNYF | 1020 |
| alternative signal | PWYKQELGKGPQLIIDIRSNVGEKKDQRIAVTLNKTAKHFSLHITETQPEDS | |
| peptide, Cα | AVYFCAASKSAIMVVLQTSSSLELALCLLSSQVNIQNPEPAVYQLKDPRSQD | |
| (substituted) | STLCLFTDFDSQINVPKTMESGTFITDKCVLDMKAMDSKSNGAIAWSNQTSF | |
| | TCQDIFKETNATYPSSDVPCDATLTEKSFETDMNLNFQNLLVIVLRILLLKV | |
| | AGFNLLMTLRLWSS | |
| CDR1β | MNHEY | 2011 |
| CDR2β | SMNVEV | 2012 |
| CDR3β | ASSIQQGADTQY | 2013 |
| Vβ without signal | QVTQNPRYLITVTGKKLTVTCSQNMNHEYMSWYRQDPGLGLRQIYYSMNVEV | 2014 |
| peptide (SignalP) | TDKGDVPEGYKVSRKEKRNFPLILESPSPNQTSLYFCASSIQQGADTQYFGP | |
| | GTRLTVL | |
| Vβ without signal | EAQVTQNPRYLITVTGKKLTVTCSQNMNHEYMSWYRQDPGLGLRQIYYSMNV | 2015 |
| peptide (IMGT) | EVTDKGDVPEGYKVSRKEKRNFPLILESPSPNQTSLYFCASSIQQGADTQYF | |
| | GPGTRLTVL | |
| Vβ | MXPQLLGYVVLCLLGAGPLEAQVTQNPRYLITVTGKKLTVTCSQNMNHEYMS | 2016 |
| | WYRQDPGLGLRQIYYSMNVEVTDKGDVPEGYKVSRKEKRNFPLILESPSPNQ | |
| | TSLYFCASSIQQGADTQYFGPGTRLTVL | 2017 |
| | (X = any amino acid) | |
| β chain with WT signal | MGPQLLGYVVLCLLGAGPLEAQVTQNPRYLITVTGKKLTVTCSQNMNHEYMS | 2018 |
| peptide, Cβ | WYRQDPGLGLRQIYYSMNVEVTDKGDVPEGYKVSRKEKRNFPLILESPSPNQ | |
| (substituted) | TSLYFCASSIQQGADTQYFGPGTRLTVLEDLRNVTPPKVSLFEPSKAEIANK | |
| | QKATLVCLARGFFPDHVELSWWVNGKEVHSGVCTDPQAYKESNYSYCLSSRL | |
| | RVSATFWHNPRNHFRCQVQFHGLSEEDKWPEGSPKPVTQNISAEAWGRADCG | |
| | ITSASYQQGVLSATILYEILLGKATLYAVLVSTLVVMAMVKRKNS | |
| β chain with alternative | MAPQLLGYVVLCLLGAGPLEAQVTQNPRYLITVTGKKLTVTCSQNMNHEYMS | 2019 |
| signal peptide, Cß | WYRQDPGLGLRQIYYSMNVEVTDKGDVPEGYKVSRKEKRNFPLILESPSPNQ | |
| (substituted) | TSLYFCASSIQQGADTQYFGPGTRLTVLEDLRNVTPPKVSLFEPSKAEIANK | |
| | QKATLVCLARGFFPDHVELSWWVNGKEVHSGVCTDPQAYKESNYSYCLSSRL | |
| | RVSATFWHNPRNHFRCQVQFHGLSEEDKWPEGSPKPVTQNISAEAWGRADCG | |
| | ITSASYQQGVLSATILYEILLGKATLYAVLVSTLVVMAMVKRKNS | |
| β chain with alternative | MHPQLLGYVVLCLLGAGPLEAQVTQNPRYLITVTGKKLTVTCSQNMNHEYMS | 2020 |
| signal peptide, Cβ | WYRQDPGLGLRQIYYSMNVEVTDKGDVPEGYKVSRKEKRNFPLILESPSPNQ | |
| (substituted) | TSLYFCASSIQQGADTQYFGPGTRLTVLEDLRNVTPPKVSLFEPSKAEIANK | |
| | QKATLVCLARGFFPDHVELSWWVNGKEVHSGVCTDPQAYKESNYSYCLSSRL | |
| | RVSATFWHNPRNHFRCQVQFHGLSEEDKWPEGSPKPVTQNISAEAWGRADCG | |
| | ITSASYQQGVLSATILYEILLGKATLYAVLVSTLVVMAMVKRKNS | |

[0166] In some embodiments, TCR002 interacts with and/or is specific for a peptide from p53. In some embodiments, the peptide is from a neoantigen of p53. In some embodiments, the neoantigen has the amino acid change R175H relative to the wild type p53 sequence. In some embodiments, TCR002 interacts with the neoantigen in the context of HLA-A*02:01, as described in International Publication No. WO 2019/067243, incorporated herein by reference in its entirety.

TABLE 6C
Amino acid sequences of TCR003.

| | | SEQ |
|---|---|---|
| | | ID |
| Description | Sequence | NO: |
| CDR1α | NSAFQY | 1021 |
| CDR2α | TYSSGN | 1022 |
| CDR3α | AMSGLKEDSSYKLI | 1023 |
| Vα w/o signal peptide | QQKEVEQDPGPLSVPEGAIVSLNCTYSNSAFQYFMWYRQYSRKGPELLMYTY | 1024 |
| (SignalP) | SSGNKEDGRFTAQVDKSSKYISLFIRDSQPSDSATYLCAMSGLKEDSSYKLI | |
| | FGSGTRLLVRP | |
| Vα w/o signal peptide | QKEVEQDPGPLSVPEGAIVSLNCTYSNSAFQYFMWYRQYSRKGPELLMYTYS | 1025 |
| (IMGT) | SGNKEDGRFTAQVDKSSKYISLFIRDSQPSDSATYLCAMSGLKEDSSYKLIF | |
| | GSGTRLLVRP | |
| Vα | MXKSLRVLLVILWLQLSWVWSQQKEVEQDPGPLSVPEGAIVSLNCTYSNSAF | 1026 |
| | QYFMWYRQYSRKGPELLMYTYSSGNKEDGRFTAQVDKSSKYISLFIRDSQPS | 1027 |
| | DSATYLCAMSGLKEDSSYKLIFGSGTRLLVRP | |
| | (X = any amino acid) | |
| α chain w/WT signal | MMKSLRVLLVILWLQLSWVWSQQKEVEQDPGPLSVPEGAIVSLNCTYSNSAF | 1028 |
| peptide, Cα | QYFMWYRQYSRKGPELLMYTYSSGNKEDGRFTAQVDKSSKYISLFIRDSQPS | |
| (substituted) | DSATYLCAMSGLKEDSSYKLIFGSGTRLLVRPNIQNPEPAVYQLKDPRSQDS | |
| | TLCLFTDFDSQINVPKTMESGTFITDKCVLDMKAMDSKSNGAIAWSNQTSFT | |
| | CQDIFKETNATYPSSDVPCDATLTEKSFETDMNLNFQNLLVIVLRILLLKVA | |
| | GFNLLMTLRLWSS | |
| α chain w/alternative | MAKSLRVLLVILWLQLSWVWSQQKEVEQDPGPLSVPEGAIVSLNCTYSNSAF | 1029 |
| signal peptide, Cα | QYFMWYRQYSRKGPELLMYTYSSGNKEDGRFTAQVDKSSKYISLFIRDSQPS | |
| (substituted) | DSATYLCAMSGLKEDSSYKLIFGSGTRLLVRPNIQNPEPAVYQLKDPRSQDS | |
| | TLCLFTDFDSQINVPKTMESGTFITDKCVLDMKAMDSKSNGAIAWSNQTSFT | |
| | CQDIFKETNATYPSSDVPCDATLTEKSFETDMNLNFQNLLVIVLRILLLKVA | |
| | GFNLLMTLRLWSS | |
| α chain w/alternative | MHKSLRVLLVILWLQLSWVWSQQKEVEQDPGPLSVPEGAIVSLNCTYSNSAF | 1030 |
| signal peptide, Cα | QYFMWYRQYSRKGPELLMYTYSSGNKEDGRFTAQVDKSSKYISLFIRDSQPS | |
| (substituted) | DSATYLCAMSGLKEDSSYKLIFGSGTRLLVRPNIQNPEPAVYQLKDPRSQDS | |
| | TLCLFTDFDSQINVPKTMESGTFITDKCVLDMKAMDSKSNGAIAWSNQTSFT | |
| | CQDIFKETNATYPSSDVPCDATLTEKSFETDMNLNFQNLLVIVLRILLLKVA | |
| | GFNLLMTLRLWSS | |
| CDR1β | MNHEY | 2021 |
| CDR2β | SMNVEV | 2022 |
| CDR3β | ASSIQQGADTQY | 2023 |
| Vβ w/o signal peptide | QVTQNPRYLITVTGKKLTVTCSQNMNHEYMSWYRQDPGLGLRQIYYSMNVEV | 2024 |
| (SignalP) | TDKGDVPEGYKVSRKEKRNFPLILESPSPNQTSLYFCASSIQQGADTQYFGP | |
| | GTRLTVL | |
| Vβ w/o signal peptide | EAQVTQNPRYLITVTGKKLTVTCSQNMNHEYMSWYRQDPGLGLRQIYYSMNV | 2025 |
| (IMGT) | EVTDKGDVPEGYKVSRKEKRNFPLILESPSPNQTSLYFCASSIQQGADTQYF | |
| | GPGTRLTVL | |
| Vβ | MXPQLLGYVVLCLLGAGPLEAQVTQNPRYLITVTGKKLTVTCSQNMNHEYMS | 2026 |
| | WYRQDPGLGLRQIYYSMNVEVTDKGDVPEGYKVSRKEKRNFPLILESPSPNQ | 2027 |
| | TSLYFCASSIQQGADTQYFGPGTRLTVL | |
| | (X = any amino acid) | |
| β chain w/WT signal | MGPQLLGYVVLCLLGAGPLEAQVTQNPRYLITVTGKKLTVTCSQNMNHEYMS | 2028 |
| peptide, Cβ | WYRQDPGLGLRQIYYSMNVEVTDKGDVPEGYKVSRKEKRNFPLILESPSPNQ | |
| (substituted) | TSLYFCASSIQQGADTQYFGPGTRLTVLEDLRNVTPPKVSLFEPSKAEIANK | |
| | QKATLVCLARGFFPDHVELSWWVNGKEVHSGVCTDPQAYKESNYSYCLSSRL | |
| | RVSATFWHNPRNHFRCQVQFHGLSEEDKWPEGSPKPVTQNISAEAWGRADCG | |
| | ITSASYQQGVLSATILYEILLGKATLYAVLVSTLVVMAMVKRKNS | |
| β chain w/alternative | MAPQLLGYVVLCLLGAGPLEAQVTQNPRYLITVTGKKLTVTCSQNMNHEYMS | 2029 |
| signal peptide, Cβ | WYRQDPGLGLRQIYYSMNVEVTDKGDVPEGYKVSRKEKRNFPLILESPSPNQ | |
| (substituted) | TSLYFCASSIQQGADTQYFGPGTRLTVLEDLRNVTPPKVSLFEPSKAEIANK | |
| | QKATLVCLARGFFPDHVELSWWVNGKEVHSGVCTDPQAYKESNYSYCLSSRL | |
| | RVSATFWHNPRNHFRCQVQFHGLSEEDKWPEGSPKPVTQNISAEAWGRADCG | |
| | ITSASYQQGVLSATILYEILLGKATLYAVLVSTLVVMAMVKRKNS | |
| β chain w/alternative | MHPQLLGYVVLCLLGAGPLEAQVTQNPRYLITVTGKKLTVTCSQNMNHEYMS | 2030 |
| signal peptide, Cβ | WYRQDPGLGLRQIYYSMNVEVTDKGDVPEGYKVSRKEKRNFPLILESPSPNQ | |
| (substituted) | TSLYFCASSIQQGADTQYFGPGTRLTVLEDLRNVTPPKVSLFEPSKAEIANK | |
| | QKATLVCLARGFFPDHVELSWWVNGKEVHSGVCTDPQAYKESNYSYCLSSRL | |
| | RVSATFWHNPRNHFRCQVQFHGLSEEDKWPEGSPKPVTQNISAEAWGRADCG | |
| | ITSASYQQGVLSATILYEILLGKATLYAVLVSTLVVMAMVKRKNS | |

[0167] In some embodiments, TCR003 interacts with and/or is specific for a peptide from p53. In some embodiments, the peptide is from a neoantigen of p53. In some embodiments, the neoantigen has the amino acid change R175H relative to the wild type p53 sequence. In some embodiments, TCR003 interacts with the neoantigen in the context of HLA-A*02:01, as described in International Publication No. WO 2020/264269, incorporated herein by reference in its entirety.

TABLE 6D
Amino acid sequences of TCR004.

| | | SEQ |
|---|---|---|
| | | ID |
| Description | Sequence | NO: |
| CDR1α | NSASQS | 1031 |
| CDR2α | VYSSGN | 1032 |
| CDR3α | VVQPGGYQKVT | 1033 |
| Vα w/o signal peptide | QRKEVEQDPGPFNVPEGATVAFNCTYSNSASQSFFWYRQDCRKEPKLLMSVY | 1034 |
| (SignalP) | SSGNEDGRFTAQLNRASQYISLLIRDSKLSDSATYLCVVQPGGYQKVTFGTG | |
| | TKLQVIP | |
| Vα w/o signal peptide | RKEVEQDPGPFNVPEGATVAFNCTYSNSASQSFFWYRQDCRKEPKLLMSVYS | 1035 |
| (IMGT) | SGNEDGRFTAQLNRASQYISLLIRDSKLSDSATYLCVVQPGGYQKVTFGTGT | |
| | KLQVIP | |
| Vα | MXSLRVLLVILWLQLSWVWSQRKEVEQDPGPFNVPEGATVAFNCTYSNSASQ | 1036 |
| | SFFWYRQDCRKEPKLLMSVYSSGNEDGRFTAQLNRASQYISLLIRDSKLSDS | 1037 |
| | ATYLCVVQPGGYQKVTFGTGTKLQVIP | |
| | (X = any amino acid) | |
| α chain w/WT signal | MISLRVLLVILWLQLSWVWSQRKEVEQDPGPFNVPEGATVAFNCTYSNSASQ | 1038 |
| peptide, Cα | SFFWYRQDCRKEPKLLMSVYSSGNEDGRFTAQLNRASQYISLLIRDSKLSDS | |
| (substituted) | ATYLCVVQPGGYQKVTFGTGTKLQVIPNIQNPEPAVYQLKDPRSQDSTLCLF | |
| | TDFDSQINVPKTMESGTFITDKCVLDMKAMDSKSNGAIAWSNQTSFTCQDIF | |
| | KETNATYPSSDVPCDATLTEKSFETDMNLNFQNLLVIVLRILLLKVAGFNLL | |
| | MTLRLWSS | |
| α chain w/alternative | MASLRVLLVILWLQLSWVWSQRKEVEQDPGPFNVPEGATVAFNCTYSNSASQ | 1039 |
| signal peptide, Cα | SFFWYRQDCRKEPKLLMSVYSSGNEDGRFTAQLNRASQYISLLIRDSKLSDS | |
| (substituted) | ATYLCVVQPGGYQKVTFGTGTKLQVIPNIQNPEPAVYQLKDPRSQDSTLCLF | |
| | TDFDSQINVPKTMESGTFITDKCVLDMKAMDSKSNGAIAWSNQTSFTCQDIF | |
| | KETNATYPSSDVPCDATLTEKSFETDMNLNFQNLLVIVLRILLLKVAGFNLL | |
| | MTLRLWSS | |
| α chain w/alternative | MHSLRVLLVILWLQLSWVWSQRKEVEQDPGPFNVPEGATVAFNCTYSNSASQ | 1040 |
| signal peptide, Cα | SFFWYRQDCRKEPKLLMSVYSSGNEDGRFTAQLNRASQYISLLIRDSKLSDS | |
| (substituted) | ATYLCVVQPGGYQKVTFGTGTKLQVIPNIQNPEPAVYQLKDPRSQDSTLCLF | |
| | TDFDSQINVPKTMESGTFITDKCVLDMKAMDSKSNGAIAWSNQTSFTCQDIF | |
| | KETNATYPSSDVPCDATLTEKSFETDMNLNFQNLLVIVLRILLLKVAGFNLL | |
| | MTLRLWSS | |
| CDR1β | MNHNS | 2031 |
| CDR2β | SASEGT | 2032 |
| CDR3β | ASSEGLWQVGDEQY | 2033 |
| Vβ w/o signal peptide | GVTQTPKFQVLKTGQSMTLQCAQDMNHNSMYWYRQDPGMGLRLIYYSASEGT | 2034 |
| (SignalP) | TDKGEVPNGYNVSRLNKREFSLRLESAAPSQTSVYFCASSEGLWQVGDEQYF | |
| | GPGTRLTVT | |
| Vβ w/o signal peptide | NAGVTQTPKFQVLKTGQSMTLQCAQDMNHNSMYWYRQDPGMGLRLIYYSASE | 2035 |
| (IMGT) | GTTDKGEVPNGYNVSRLNKREFSLRLESAAPSQTSVYFCASSEGLWQVGDEQ | |
| | YFGPGTRLTVT | |
| Vβ | MXIGLLCCVAFSLLWASPVNAGVTQTPKFQVLKTGQSMTLQCAQDMNHNSMY | 2036 |
| | WYRQDPGMGLRLIYYSASEGTTDKGEVPNGYNVSRLNKREFSLRLESAAPSQ | 2037 |
| | TSVYFCASSEGLWQVGDEQYFGPGTRLTVT | |
| | (X = any amino acid) | |
| β chain w/WT signal | MSIGLLCCVAFSLLWASPVNAGVTQTPKFQVLKTGQSMTLQCAQDMNHNSMY | 2038 |
| peptide, Cβ | WYRQDPGMGLRLIYYSASEGTTDKGEVPNGYNVSRLNKREFSLRLESAAPSQ | |
| (substituted) | TSVYFCASSEGLWQVGDEQYFGPGTRLTVTEDLRNVTPPKVSLFEPSKAEIA | |
| | NKQKATLVCLARGFFPDHVELSWWVNGKEVHSGVCTDPQAYKESNYSYCLSS | |
| | RLRVSATFWHNPRNHFRCQVQFHGLSEEDKWPEGSPKPVTQNISAEAWGRAD | |
| | CGITSASYQQGVLSATILYEILLGKATLYAVLVSTLVVMAMVKRKNS | |
| β chain w/alternative | MAIGLLCCVAFSLLWASPVNAGVTQTPKFQVLKTGQSMTLQCAQDMNHNSMY | 2039 |
| signal peptide, Cβ | WYRQDPGMGLRLIYYSASEGTTDKGEVPNGYNVSRLNKREFSLRLESAAPSQ | |
| (substituted) | TSVYFCASSEGLWQVGDEQYFGPGTRLTVTEDLRNVTPPKVSLFEPSKAEIA | |
| | NKQKATLVCLARGFFPDHVELSWWVNGKEVHSGVCTDPQAYKESNYSYCLSS | |
| | RLRVSATFWHNPRNHFRCQVQFHGLSEEDKWPEGSPKPVTQNISAEAWGRAD | |
| | CGITSASYQQGVLSATILYEILLGKATLYAVLVSTLVVMAMVKRKNS | |
| β chain w/alternative | MHIGLLCCVAFSLLWASPVNAGVTQTPKFQVLKTGQSMTLQCAQDMNHNSMY | 2040 |
| signal peptide, Cβ | WYRQDPGMGLRLIYYSASEGTTDKGEVPNGYNVSRLNKREFSLRLESAAPSQ | |
| (substituted) | TSVYFCASSEGLWQVGDEQYFGPGTRLTVTEDLRNVTPPKVSLFEPSKAEIA | |
| | NKQKATLVCLARGFFPDHVELSWWVNGKEVHSGVCTDPQAYKESNYSYCLSS | |
| | RLRVSATFWHNPRNHFRCQVQFHGLSEEDKWPEGSPKPVTQNISAEAWGRAD | |
| | CGITSASYQQGVLSATILYEILLGKATLYAVLVSTLVVMAMVKRKNS | |

[0168] In some embodiments, TCR004 interacts with and/or is specific for p53. In some embodiments, the peptide is from a neoantigen of p53. In some embodiments, the neoantigen has the amino acid change R175H relative to the wild type p53 sequence. In some embodiments, TCR004 interacts with the neoantigen in the context of HLA-A*02:01, as described in International Publication No. WO 2019/067243, incorporated herein by reference in its entirety.

TABLE 6E
Amino acid sequences of TCR005.

| | | SEQ |
|---|---|---|
| | | ID |
| Description | Sequence | NO: |
| CDR1α | TSENNYY | 1041 |
| CDR2α | QEAYKQQN | 1042 |
| CDR3α | AFMGYSGAGSYQLT | 1043 |
| Vα w/o signal peptide | QTVTQSQPEMSVQEAETVTLSCTYDTSENNYYLFWYKQPPSRQMILVIRQEA | 1044 |
| (SignalP) | YKQQNATENRFSVNFQKAAKSFSLKISDSQLGDTAMYFCAFMGYSGAGSYQL | |
| | TFGKGTKLSVIP | |
| Vα w/o signal peptide | AQTVTQSQPEMSVQEAETVTLSCTYDTSENNYYLFWYKQPPSRQMILVIRQE | 1045 |
| (IMGT) | AYKQQNATENRFSVNFQKAAKSFSLKISDSQLGDTAMYFCAFMGYSGAGSYQ | |
| | LTFGKGTKLSVIP | |
| Vα | MXRVSLLWAVVVSTCLESGMAQTVTQSQPEMSVQEAETVTLSCTYDTSENNY | 1046 |
| | YLFWYKQPPSRQMILVIRQEAYKQQNATENRFSVNFQKAAKSFSLKISDSQL | 1047 |
| | GDTAMYFCAFMGYSGAGSYQLTFGKGTKLSVIP | |
| | (X = any amino acid) | |
| α chain w/WT signal | MTRVSLLWAVVVSTCLESGMAQTVTQSQPEMSVQEAETVTLSCTYDTSENNY | 1048 |
| peptide, Cα | YLFWYKQPPSRQMILVIRQEAYKQQNATENRFSVNFQKAAKSFSLKISDSQL | |
| (substituted) | GDTAMYFCAFMGYSGAGSYQLTFGKGTKLSVIPNIQNPEPAVYQLKDPRSQD | |
| | STLCLFTDFDSQINVPKTMESGTFITDKCVLDMKAMDSKSNGAIAWSNQTSF | |
| | TCQDIFKETNATYPSSDVPCDATLTEKSFETDMNLNFQNLLVIVLRILLLKV | |
| | AGFNLLMTLRLWSS | |
| α chain w/alternative | MARVSLLWAVVVSTCLESGMAQTVTQSQPEMSVQEAETVTLSCTYDTSENNY | 1049 |
| signal peptide, Cα | YLFWYKQPPSRQMILVIRQEAYKQQNATENRFSVNFQKAAKSFSLKISDSQL | |
| (substituted) | GDTAMYFCAFMGYSGAGSYQLTFGKGTKLSVIPNIQNPEPAVYQLKDPRSQD | |
| | STLCLFTDFDSQINVPKTMESGTFITDKCVLDMKAMDSKSNGAIAWSNQTSF | |
| | TCQDIFKETNATYPSSDVPCDATLTEKSFETDMNLNFQNLLVIVLRILLLKV | |
| | AGFNLLMTLRLWSS | |
| α chain w/alternative | MHRVSLLWAVVVSTCLESGMAQTVTQSQPEMSVQEAETVTLSCTYDTSENNY | 1050 |
| signal peptide, Cα | YLFWYKQPPSRQMILVIRQEAYKQQNATENRFSVNFQKAAKSFSLKISDSQL | |
| (substituted) | GDTAMYFCAFMGYSGAGSYQLTFGKGTKLSVIPNIQNPEPAVYQLKDPRSQD | |
| | STLCLFTDFDSQINVPKTMESGTFITDKCVLDMKAMDSKSNGAIAWSNQTSF | |
| | TCQDIFKETNATYPSSDVPCDATLTEKSFETDMNLNFQNLLVIVLRILLLKV | |
| | AGFNLLMTLRLWSS | |
| CDR1β | ENHRY | 2041 |
| CDR2β | SYGVKD | 2042 |
| CDR3β | AISELVTGDSPLH | 2043 |
| Vβ w/o signal peptide | GITQSPRHKVTETGTPVTLRCHQTENHRYMYWYRQDPGHGLRLIHYSYGVKD | 2044 |
| (SignalP) | TDKGEVSDGYSVSRSKTEDFLLTLESATSSQTSVYFCAISELVTGDSPLHFG | |
| | NGTRLTVT | |
| Vβ w/o signal peptide | DAGITQSPRHKVTETGTPVTLRCHQTENHRYMYWYRQDPGHGLRLIHYSYGV | 2045 |
| (IMGT) | KDTDKGEVSDGYSVSRSKTEDFLLTLESATSSQTSVYFCAISELVTGDSPLH | |
| | FGNGTRLTVT | |
| Vβ | MXTRLFFYVALCLLWTGHMDAGITQSPRHKVTETGTPVTLRCHQTENHRYMY | 2046 |
| | WYRQDPGHGLRLIHYSYGVKDTDKGEVSDGYSVSRSKTEDFLLTLESATSSQ | 2047 |
| | TSVYFCAISELVTGDSPLHFGNGTRLTVT | |
| | (X = any amino acid) | |
| β chain w/WT signal | MGTRLFFYVALCLLWTGHMDAGITQSPRHKVTETGTPVTLRCHQTENHRYMY | 2048 |
| peptide, Cβ | WYRQDPGHGLRLIHYSYGVKDTDKGEVSDGYSVSRSKTEDFLLTLESATSSQ | |
| (substituted) | TSVYFCAISELVTGDSPLHFGNGTRLTVTEDLRNVTPPKVSLFEPSKAEIAN | |
| | KQKATLVCLARGFFPDHVELSWWVNGKEVHSGVCTDPQAYKESNYSYCLSSR | |
| | LRVSATFWHNPRNHFRCQVQFHGLSEEDKWPEGSPKPVTQNISAEAWGRADC | |
| | GITSASYQQGVLSATILYEILLGKATLYAVLVSTLVVMAMVKRKNS | |
| β chain w/alternative | MATRLFFYVALCLLWTGHMDAGITQSPRHKVTETGTPVTLRCHQTENHRYMY | 2049 |
| signal peptide, Cβ | WYRQDPGHGLRLIHYSYGVKDTDKGEVSDGYSVSRSKTEDFLLTLESATSSQ | |
| (substituted) | TSVYFCAISELVTGDSPLHFGNGTRLTVTEDLRNVTPPKVSLFEPSKAEIAN | |
| | KQKATLVCLARGFFPDHVELSWWVNGKEVHSGVCTDPQAYKESNYSYCLSSR | |
| | LRVSATFWHNPRNHFRCQVQFHGLSEEDKWPEGSPKPVTQNISAEAWGRADC | |
| | GITSASYQQGVLSATILYEILLGKATLYAVLVSTLVVMAMVKRKNS | |
| β chain w/alternative | MHTRLFFYVALCLLWTGHMDAGITQSPRHKVTETGTPVTLRCHQTENHRYMY | 2050 |
| signal peptide, Cβ | WYRQDPGHGLRLIHYSYGVKDTDKGEVSDGYSVSRSKTEDFLLTLESATSSQ | |
| (substituted) | TSVYFCAISELVTGDSPLHFGNGTRLTVTEDLRNVTPPKVSLFEPSKAEIAN | |
| | KQKATLVCLARGFFPDHVELSWWVNGKEVHSGVCTDPQAYKESNYSYCLSSR | |
| | LRVSATFWHNPRNHFRCQVQFHGLSEEDKWPEGSPKPVTQNISAEAWGRADC | |
| | GITSASYQQGVLSATILYEILLGKATLYAVLVSTLVVMAMVKRKNS | |

[0169] In some embodiments, TCR005 interacts with and/or is specific for p53. In some embodiments, the peptide is from a neoantigen of p53. In some embodiments, the neoantigen has the amino acid change R175H relative to the wild type p53 sequence. In some embodiments, TCR005 interacts with the neoantigen in the context of HLA-A*02:01, as described in International Publication No. WO 2019/067243, incorporated herein by reference in its entirety.

TABLE 6F
Amino acid sequences of TCR006.

| | | SEQ |
|---|---|---|
| | | ID |
| Description | Sequence | NO: |
| CDR1α | TISGNEY | 1051 |
| CDR2α | GLKNN | 1052 |
| CDR3α | IVRGSPGAGGTSYGKLT | 1053 |
| Vα w/o signal peptide | KTTQPPSMDCAEGRAANLPCNHSTISGNEYVYWYRQIHSQGPQYIIHGLKNN | 1054 |
| (SignalP) | ETNEMASLIITEDRKSSTLILPHATLRDTAVYYCIVRGSPGAGGTSYGKLTF | |
| | GQGTILTVHP | |
| Vα w/o signal peptide | DAKTTQPPSMDCAEGRAANLPCNHSTISGNEYVYWYRQIHSQGPQYIIHGLK | 1055 |
| (IMGT) | NNETNEMASLIITEDRKSSTLILPHATLRDTAVYYCIVRGSPGAGGTSYGKL | |
| | TFGQGTILTVHP | |
| Vα | MXLVARVTVFLTFGTIIDAKTTQPPSMDCAEGRAANLPCNHSTISGNEYVYW | 1056 |
| | YRQIHSQGPQYIIHGLKNNETNEMASLIITEDRKSSTLILPHATLRDTAVYY | 1057 |
| | CIVRGSPGAGGTSYGKLTFGQGTILTVHP | |
| | (X = any amino acid) | |
| α chain w/WT signal | MRLVARVTVFLTFGTIIDAKTTQPPSMDCAEGRAANLPCNHSTISGNEYVYW | 1058 |
| peptide, Cα | YRQIHSQGPQYIIHGLKNNETNEMASLIITEDRKSSTLILPHATLRDTAVYY | |
| (substituted) | CIVRGSPGAGGTSYGKLTFGQGTILTVHPNIQNPEPAVYQLKDPRSQDSTLC | |
| | LFTDFDSQINVPKTMESGTFITDKCVLDMKAMDSKSNGAIAWSNQTSFTCQD | |
| | IFKETNATYPSSDVPCDATLTEKSFETDMNLNFQNLLVIVLRILLLKVAGFN | |
| | LLMTLRLWSS | |
| α chain w/alternative | MALVARVTVFLTFGTIIDAKTTQPPSMDCAEGRAANLPCNHSTISGNEYVYW | 1059 |
| signal peptide, Cα | YRQIHSQGPQYIIHGLKNNETNEMASLIITEDRKSSTLILPHATLRDTAVYY | |
| (substituted) | CIVRGSPGAGGTSYGKLTFGQGTILTVHPNIQNPEPAVYQLKDPRSQDSTLC | |
| | LFTDFDSQINVPKTMESGTFITDKCVLDMKAMDSKSNGAIAWSNQTSFTCQD | |
| | IFKETNATYPSSDVPCDATLTEKSFETDMNLNFQNLLVIVLRILLLKVAGFN | |
| | LLMTLRLWSS | |
| α chain w/alternative | MHLVARVTVFLTFGTIIDAKTTQPPSMDCAEGRAANLPCNHSTISGNEYVYW | 1060 |
| signal peptide, Cα | YRQIHSQGPQYIIHGLKNNETNEMASLIITEDRKSSTLILPHATLRDTAVYY | |
| (substituted) | CIVRGSPGAGGTSYGKLTFGQGTILTVHPNIQNPEPAVYQLKDPRSQDSTLC | |
| | LFTDFDSQINVPKTMESGTFITDKCVLDMKAMDSKSNGAIAWSNQTSFTCQD | |
| | IFKETNATYPSSDVPCDATLTEKSFETDMNLNFQNLLVIVLRILLLKVAGFN | |
| | LLMTLRLWSS | |
| CDR1β | LNHDA | 2051 |
| CDR2β | SQIVND | 2052 |
| CDR3β | ASSIRTEAF | 2053 |
| Vβ w/o signal peptide | GITQSPKYLFRKEGQNVTLSCEQNLNHDAMYWYRQDPGQGLRLIYYSQIVND | 2054 |
| (SignalP) | FQKGDIAEGYSVSREKKESFPLTVTSAQKNPTAFYLCASSIRTEAFFGQGTR | |
| | LTVV | |
| Vβ w/o signal peptide | DGGITQSPKYLFRKEGQNVTLSCEQNLNHDAMYWYRQDPGQGLRLIYYSQIV | 2055 |
| (IMGT) | NDFQKGDIAEGYSVSREKKESFPLTVTSAQKNPTAFYLCASSIRTEAFFGQG | |
| | TRLTVV | |
| Vβ | MXNQVLCCVVLCFLGANTVDGGITQSPKYLFRKEGQNVTLSCEQNLNHDAMY | 2056 |
| | WYRQDPGQGLRLIYYSQIVNDFQKGDIAEGYSVSREKKESFPLTVTSAQKNP | 2057 |
| | TAFYLCASSIRTEAFFGQGTRLTVV | |
| | (X = any amino acid) | |
| β chain w/WT signal | MSNQVLCCVVLCFLGANTVDGGITQSPKYLFRKEGQNVTLSCEQNLNHDAMY | 2058 |
| peptide, Cβ | WYRQDPGQGLRLIYYSQIVNDFQKGDIAEGYSVSREKKESFPLTVTSAQKNP | |
| (substituted) | TAFYLCASSIRTEAFFGQGTRLTVVEDLRNVTPPKVSLFEPSKAEIANKQKA | |
| | TLVCLARGFFPDHVELSWWVNGKEVHSGVCTDPQAYKESNYSYCLSSRLRVS | |
| | ATFWHNPRNHFRCQVQFHGLSEEDKWPEGSPKPVTQNISAEAWGRADCGITS | |
| | ASYQQGVLSATILYEILLGKATLYAVLVSTLVVMAMVKRKNS | |
| β chain w/alternative | MANQVLCCVVLCFLGANTVDGGITQSPKYLFRKEGQNVTLSCEQNLNHDAMY | 2059 |
| signal peptide, Cβ | WYRQDPGQGLRLIYYSQIVNDFQKGDIAEGYSVSREKKESFPLTVTSAQKNP | |
| (substituted) | TAFYLCASSIRTEAFFGQGTRLTVVEDLRNVTPPKVSLFEPSKAEIANKQKA | |
| | TLVCLARGFFPDHVELSWWVNGKEVHSGVCTDPQAYKESNYSYCLSSRLRVS | |
| | ATFWHNPRNHFRCQVQFHGLSEEDKWPEGSPKPVTQNISAEAWGRADCGITS | |
| | ASYQQGVLSATILYEILLGKATLYAVLVSTLVVMAMVKRKNS | |
| β chain w/alternative | MHNQVLCCVVLCFLGANTVDGGITQSPKYLFRKEGQNVTLSCEQNLNHDAMY | 2060 |
| signal peptide, Cβ | WYRQDPGQGLRLIYYSQIVNDFQKGDIAEGYSVSREKKESFPLTVTSAQKNP | |
| (substituted) | TAFYLCASSIRTEAFFGQGTRLTVVEDLRNVTPPKVSLFEPSKAEIANKQKA | |
| | TLVCLARGFFPDHVELSWWVNGKEVHSGVCTDPQAYKESNYSYCLSSRLRVS | |
| | ATFWHNPRNHFRCQVQFHGLSEEDKWPEGSPKPVTQNISAEAWGRADCGITS | |
| | ASYQQGVLSATILYEILLGKATLYAVLVSTLVVMAMVKRKNS | |

[0170] In some embodiments, TCR006 interacts with and/or is specific for p53. In some embodiments, the peptide is from a neoantigen of p53. In some embodiments, the neoantigen has the amino acid change R175H relative to the wild type p53 sequence. In some embodiments, TCR006 interacts with the neoantigen in the context of HLA-DRB1*13:01, as described in International Publication No. WO 2020/264269, incorporated herein by reference in its entirety.

TABLE 6G
Amino acid sequences of TCR007.

| | | SEQ |
|---|---|---|
| | | ID |
| Description | Sequence | NO: |
| CDR1α | TTSDR | 1061 |
| CDR2α | LLSNGAV | 1062 |
| CDR3α | AVAHMDSNYQLI | 1063 |
| Vα w/o signal peptide | ELKVEQNPLFLSMQEGKNYTIYCNYSTTSDRLYWYRQDPGKSLESLFVLLSN | 1064 |
| (SignalP) | GAVKQEGRLMASLDTKARLSTLHITAAVHDLSATYFCAVAHMDSNYQLIWGA | |
| | GTKLIIKP | |
| Vα w/o signal peptide | ELKVEQNPLFLSMQEGKNYTIYCNYSTTSDRLYWYRQDPGKSLESLFVLLSN | 1065 |
| (IMGT) | GAVKQEGRLMASLDTKARLSTLHITAAVHDLSATYFCAVAHMDSNYQLIWGA | |
| | GTKLIIKP | |
| Vα | MXKLLAMILWLQLDRLSGELKVEQNPLFLSMQEGKNYTIYCNYSTTSDRLYW | 1066 |
| | YRQDPGKSLESLFVLLSNGAVKQEGRLMASLDTKARLSTLHITAAVHDLSAT | 1067 |
| | YFCAVAHMDSNYQLIWGAGTKLIIKP | |
| | (X = any amino acid) | |
| α chain w/WT signal | MKKLLAMILWLQLDRLSGELKVEQNPLFLSMQEGKNYTIYCNYSTTSDRLYW | 1068 |
| peptide, Cα | YRQDPGKSLESLFVLLSNGAVKQEGRLMASLDTKARLSTLHITAAVHDLSAT | |
| (substituted) | YFCAVAHMDSNYQLIWGAGTKLIIKPNIQNPEPAVYQLKDPRSQDSTLCLFT | |
| | DFDSQINVPKTMESGTFITDKCVLDMKAMDSKSNGAIAWSNQTSFTCQDIFK | |
| | ETNATYPSSDVPCDATLTEKSFETDMNLNFQNLLVIVLRILLLKVAGFNLLM | |
| | TLRLWSS | |
| α chain w/alternative | MAKLLAMILWLQLDRLSGELKVEQNPLFLSMQEGKNYTIYCNYSTTSDRLYW | 1069 |
| signal peptide, Cα | YRQDPGKSLESLFVLLSNGAVKQEGRLMASLDTKARLSTLHITAAVHDLSAT | |
| (substituted) | YFCAVAHMDSNYQLIWGAGTKLIIKPNIQNPEPAVYQLKDPRSQDSTLCLFT | |
| | DFDSQINVPKTMESGTFITDKCVLDMKAMDSKSNGAIAWSNQTSFTCQDIFK | |
| | ETNATYPSSDVPCDATLTEKSFETDMNLNFQNLLVIVLRILLLKVAGFNLLM | |
| | TLRLWSS | |
| α chain w/alternative | MHKLLAMILWLQLDRLSGELKVEQNPLFLSMQEGKNYTIYCNYSTTSDRLYW | 1070 |
| signal peptide, Cα | YRQDPGKSLESLFVLLSNGAVKQEGRLMASLDTKARLSTLHITAAVHDLSAT | |
| (substituted) | YFCAVAHMDSNYQLIWGAGTKLIIKPNIQNPEPAVYQLKDPRSQDSTLCLFT | |
| | DFDSQINVPKTMESGTFITDKCVLDMKAMDSKSNGAIAWSNQTSFTCQDIFK | |
| | ETNATYPSSDVPCDATLTEKSFETDMNLNFQNLLVIVLRILLLKVAGFNLLM | |
| | TLRLWSS | |
| CDR1β | MNHEY | 2061 |
| CDR2β | SVGEGT | 2062 |
| CDR3β | ASSYAGLAAPREQF | 2063 |
| Vβ w/o signal peptide | GVTQTPKFRVLKTGQSMTLLCAQDMNHEYMYWYRQDPGMGLRLIHYSVGEGT | 2064 |
| (SignalP) | TAKGEVPDGYNVSRLKKQNFLLGLESAAPSQTSVYFCASSYAGLAAPREQFF | |
| | GPGTRLTVL | |
| Vβ w/o signal peptide | NAGVTQTPKFRVLKTGQSMTLLCAQDMNHEYMYWYRQDPGMGLRLIHYSVGE | 2065 |
| (IMGT) | GTTAKGEVPDGYNVSRLKKQNFLLGLESAAPSQTSVYFCASSYAGLAAPREQ | |
| | FFGPGTRLTVL | |
| Vβ | MXLGLLCCGAFSLLWAGPVNAGVTQTPKFRVLKTGQSMTLLCAQDMNHEYMY | 2066 |
| | WYRQDPGMGLRLIHYSVGEGTTAKGEVPDGYNVSRLKKQNFLLGLESAAPSQ | 2067 |
| | TSVYFCASSYAGLAAPREQFFGPGTRLTVL | |
| | (X = any amino acid) | |
| β chain w/WT signal | MSLGLLCCGAFSLLWAGPVNAGVTQTPKFRVLKTGQSMTLLCAQDMNHEYMY | 2068 |
| peptide, Cβ | WYRQDPGMGLRLIHYSVGEGTTAKGEVPDGYNVSRLKKQNFLLGLESAAPSQ | |
| (substituted) | TSVYFCASSYAGLAAPREQFFGPGTRLTVLEDLRNVTPPKVSLFEPSKAEIA | |
| | NKQKATLVCLARGFFPDHVELSWWVNGKEVHSGVCTDPQAYKESNYSYCLSS | |
| | RLRVSATFWHNPRNHFRCQVQFHGLSEEDKWPEGSPKPVTQNISAEAWGRAD | |
| | CGITSASYQQGVLSATILYEILLGKATLYAVLVSTLVVMAMVKRKNS | |
| β chain w/alternative | MALGLLCCGAFSLLWAGPVNAGVTQTPKFRVLKTGQSMTLLCAQDMNHEYMY | 2069 |
| signal peptide, Cβ | WYRQDPGMGLRLIHYSVGEGTTAKGEVPDGYNVSRLKKQNFLLGLESAAPSQ | |
| (substituted) | TSVYFCASSYAGLAAPREQFFGPGTRLTVLEDLRNVTPPKVSLFEPSKAEIA | |
| | NKQKATLVCLARGFFPDHVELSWWVNGKEVHSGVCTDPQAYKESNYSYCLSS | |
| | RLRVSATFWHNPRNHFRCQVQFHGLSEEDKWPEGSPKPVTQNISAEAWGRAD | |
| | CGITSASYQQGVLSATILYEILLGKATLYAVLVSTLVVMAMVKRKNS | |
| β chain w/alternative | MHLGLLCCGAFSLLWAGPVNAGVTQTPKFRVLKTGQSMTLLCAQDMNHEYMY | 2070 |
| signal peptide, Cβ | WYRQDPGMGLRLIHYSVGEGTTAKGEVPDGYNVSRLKKQNFLLGLESAAPSQ | |
| (substituted) | TSVYFCASSYAGLAAPREQFFGPGTRLTVLEDLRNVTPPKVSLFEPSKAEIA | |
| | NKQKATLVCLARGFFPDHVELSWWVNGKEVHSGVCTDPQAYKESNYSYCLSS | |
| | RLRVSATFWHNPRNHFRCQVQFHGLSEEDKWPEGSPKPVTQNISAEAWGRAD | |
| | CGITSASYQQGVLSATILYEILLGKATLYAVLVSTLVVMAMVKRKNS | |

[0171] In some embodiments, TCR007 interacts with and/or is specific for p53. In some embodiments, the peptide is from a neoantigen of p53. In some embodiments, the neoantigen has the amino acid change R175H relative to the wild type p53 sequence. In some embodiments, TCR007 interacts with the neoantigen in the context of HLA-DRB1*13:01, as described in International Publication No. WO 2020/264269, incorporated herein by reference in its entirety.

TABLE 6H
Amino acid sequences of TCR008.

| | | SEQ |
|---|---|---|
| | | ID |
| Description | Sequence | NO: |
| CDR1α | TISGNEY | 1071 |
| CDR2α | GLKNN | 1072 |
| CDR3α | IVRARANAGGTSYGKLT | 1073 |
| Vα w/o signal peptide | KTTQPPSMDCAEGRAANLPCNHSTISGNEYVYWYRQIHSQGPQYIIHGLKNN | 1074 |
| (SignalP) | ETNEMASLIITEDRKSSTLILPHATLRDTAVYYCIVRARANAGGTSYGKLTF | |
| | GQGTILTVHP | |
| Vα w/o signal peptide | DAKTTQPPSMDCAEGRAANLPCNHSTISGNEYVYWYRQIHSQGPQYIIHGLK | 1075 |
| (IMGT) | NNETNEMASLIITEDRKSSTLILPHATLRDTAVYYCIVRARANAGGTSYGKL | |
| | TFGQGTILTVHP | |
| Vα | MXLVARVTVFLTFGTIIDAKTTQPPSMDCAEGRAANLPCNHSTISGNEYVYW | 1076 |
| | YRQIHSQGPQYIIHGLKNNETNEMASLIITEDRKSSTLILPHATLRDTAVYY | 1077 |
| | CIVRARANAGGTSYGKLTFGQGTILTVHP | |
| | (X = any amino acid) | |
| α chain w/WT signal | MRLVARVTVFLTFGTIIDAKTTQPPSMDCAEGRAANLPCNHSTISGNEYVYW | 1078 |
| peptide, Cα | YRQIHSQGPQYIIHGLKNNETNEMASLIITEDRKSSTLILPHATLRDTAVYY | |
| (substituted) | CIVRARANAGGTSYGKLTFGQGTILTVHPNIQNPEPAVYQLKDPRSQDSTLC | |
| | LFTDFDSQINVPKTMESGTFITDKCVLDMKAMDSKSNGAIAWSNQTSFTCQD | |
| | IFKETNATYPSSDVPCDATLTEKSFETDMNLNFQNLLVIVLRILLLKVAGFN | |
| | LLMTLRLWSS | |
| α chain w/alternative | MALVARVTVFLTFGTIIDAKTTQPPSMDCAEGRAANLPCNHSTISGNEYVYW | 1079 |
| signal peptide, Cα | YRQIHSQGPQYIIHGLKNNETNEMASLIITEDRKSSTLILPHATLRDTAVYY | |
| (substituted) | CIVRARANAGGTSYGKLTFGQGTILTVHPNIQNPEPAVYQLKDPRSQDSTLC | |
| | LFTDFDSQINVPKTMESGTFITDKCVLDMKAMDSKSNGAIAWSNQTSFTCQD | |
| | IFKETNATYPSSDVPCDATLTEKSFETDMNLNFQNLLVIVLRILLLKVAGFN | |
| | LLMTLRLWSS | |
| α chain w/alternative | MHLVARVTVFLTFGTIIDAKTTQPPSMDCAEGRAANLPCNHSTISGNEYVYW | 1080 |
| signal peptide, Cα | YRQIHSQGPQYIIHGLKNNETNEMASLIITEDRKSSTLILPHATLRDTAVYY | |
| (substituted) | CIVRARANAGGTSYGKLTFGQGTILTVHPNIQNPEPAVYQLKDPRSQDSTLC | |
| | LFTDFDSQINVPKTMESGTFITDKCVLDMKAMDSKSNGAIAWSNQTSFTCQD | |
| | IFKETNATYPSSDVPCDATLTEKSFETDMNLNFQNLLVIVLRILLLKVAGFN | |
| | LLMTLRLWSS | |
| CDR1β | LNHDA | 2071 |
| CDR2β | SQIVND | 2072 |
| CDR3β | ASLQFNEQF | 2073 |
| Vβ w/o signal peptide | GITQSPKYLFRKEGQNVTLSCEQNLNHDAMYWYRQDPGQGLRLIYYSQIVND | 2074 |
| (SignalP) | FQKGDIAEGYSVSREKKESFPLTVTSAQKNPTAFYLCASLQFNEQFFGPGTR | |
| | LTVL | |
| Vβ w/o signal peptide | DGGITQSPKYLFRKEGQNVTLSCEQNLNHDAMYWYRQDPGQGLRLIYYSQIV | 2075 |
| (IMGT) | NDFQKGDIAEGYSVSREKKESFPLTVTSAQKNPTAFYLCASLQFNEQFFGPG | |
| | TRLTVL | |
| Vβ | MXMSNQVLCCVVLCFLGANTVDGGITQSPKYLFRKEGQNVTLSCEQNLNHDA | 2076 |
| | MYWYRQDPGQGLRLIYYSQIVNDFQKGDIAEGYSVSREKKESFPLTVTSAQK | |
| | NPTAFYLCASLQFNEQFFGPGTRLTVL | |
| | (X = any amino acid) | |
| Vβ (alternative) | MXNQVLCCVVLCFLGANTVDGGITQSPKYLFRKEGQNVTLSCEQNLNHDAMY | 2077 |
| | WYRQDPGQGLRLIYYSQIVNDFQKGDIAEGYSVSREKKESFPLTVTSAQKNP | |
| | TAFYLCASLQFNEQFFGPGTRLTVL | |
| | (X = any amino acid) | |
| β chain w/WT signal | MSMSNQVLCCVVLCFLGANTVDGGITQSPKYLFRKEGQNVTLSCEQNLNHDA | 2078 |
| peptide, Cβ | MYWYRQDPGQGLRLIYYSQIVNDFQKGDIAEGYSVSREKKESFPLTVTSAQK | |
| (substituted) | NPTAFYLCASLQFNEQFFGPGTRLTVLEDLRNVTPPKVSLFEPSKAEIANKQ | |
| | KATLVCLARGFFPDHVELSWWVNGKEVHSGVCTDPQAYKESNYSYCLSSRLR | |
| | VSATFWHNPRNHFRCQVQFHGLSEEDKWPEGSPKPVTQNISAEAWGRADCGI | |
| | TSASYQQGVLSATILYEILLGKATLYAVLVSTLVVMAMVKRKNS | |
| β chain w/alternative | MAMSNQVLCCVVLCFLGANTVDGGITQSPKYLFRKEGQNVTLSCEQNLNHDA | 2079 |
| signal peptide, Cβ | MYWYRQDPGQGLRLIYYSQIVNDFQKGDIAEGYSVSREKKESFPLTVTSAQK | |
| (substituted) | NPTAFYLCASLQFNEQFFGPGTRLTVLEDLRNVTPPKVSLFEPSKAEIANKQ | |
| | KATLVCLARGFFPDHVELSWWVNGKEVHSGVCTDPQAYKESNYSYCLSSRLR | |
| | VSATFWHNPRNHFRCQVQFHGLSEEDKWPEGSPKPVTQNISAEAWGRADCGI | |
| | TSASYQQGVLSATILYEILLGKATLYAVLVSTLVVMAMVKRKNS | |
| β chain w/alternative | MHMSNQVLCCVVLCFLGANTVDGGITQSPKYLFRKEGQNVTLSCEQNLNHDA | 2080 |
| signal peptide, Cβ | MYWYRQDPGQGLRLIYYSQIVNDFQKGDIAEGYSVSREKKESFPLTVTSAQK | |
| (substituted) | NPTAFYLCASLQFNEQFFGPGTRLTVLEDLRNVTPPKVSLFEPSKAEIANKQ | |
| | KATLVCLARGFFPDHVELSWWVNGKEVHSGVCTDPQAYKESNYSYCLSSRLR | |
| | VSATFWHNPRNHFRCQVQFHGLSEEDKWPEGSPKPVTQNISAEAWGRADCGI | |
| | TSASYQQGVLSATILYEILLGKATLYAVLVSTLVVMAMVKRKNS | |

[0172] In some embodiments, TCR008 interacts with and/or is specific for p53. In some embodiments, the peptide is from a neoantigen of p53. In some embodiments, the neoantigen has the amino acid change R175H relative to the wild type p53 sequence. In some embodiments, TCR008 interacts with the neoantigen in the context of HLA-DRB1*13:01, as described in International Publication No. WO 2020/264269, incorporated herein by reference in its entirety.

TABLE 6I
Amino acid sequences of TCR009.

| | | SEQ |
|---|---|---|
| | | ID |
| Description | Sequence | NO: |
| CDR1α | SSNFYA | 1081 |
| CDR2α | MTLNGDE | 1082 |
| CDR3α | ALITGGGNKLT | 1083 |
| Vα w/o signal peptide | ILNVEQSPQSLHVQEGDSTNFTCSFPSSNFYALHWYRWETAKSPEALFVMTL | 1084 |
| (SignalP) | NGDEKKKGRISATLNTKEGYSYLYIKGSQPEDSATYLCALITGGGNKLTFGT | |
| | GTQLKVEL | |
| Vα w/o signal peptide | ILNVEQSPQSLHVQEGDSTNFTCSFPSSNFYALHWYRWETAKSPEALFVMTL | 1085 |
| (IMGT) | NGDEKKKGRISATLNTKEGYSYLYIKGSQPEDSATYLCALITGGGNKLTFGT | |
| | GTQLKVEL | |
| Vα | MXKNPLAAPLLILWFHLDCVSSILNVEQSPQSLHVQEGDSTNFTCSFPSSNF | 1086 |
| | YALHWYRWETAKSPEALFVMTLNGDEKKKGRISATLNTKEGYSYLYIKGSQP | 1087 |
| | EDSATYLCALITGGGNKLTFGTGTQLKVEL | |
| | (X = any amino acid) | |
| α chain w/WT signal | MEKNPLAAPLLILWFHLDCVSSILNVEQSPQSLHVQEGDSTNFTCSFPSSNF | 1088 |
| peptide, Cα | YALHWYRWETAKSPEALFVMTLNGDEKKKGRISATLNTKEGYSYLYIKGSQP | |
| (substituted) | EDSATYLCALITGGGNKLTFGTGTQLKVELNIQNPEPAVYQLKDPRSQDSTL | |
| | CLFTDFDSQINVPKTMESGTFITDKCVLDMKAMDSKSNGAIAWSNQTSFTCQ | |
| | DIFKETNATYPSSDVPCDATLTEKSFETDMNLNFQNLLVIVLRILLLKVAGF | |
| | NLLMTLRLWSS | |
| α chain w/alternative | MAKNPLAAPLLILWFHLDCVSSILNVEQSPQSLHVQEGDSTNFTCSFPSSNF | 1089 |
| signal peptide, Cα | YALHWYRWETAKSPEALFVMTLNGDEKKKGRISATLNTKEGYSYLYIKGSQP | |
| (substituted) | EDSATYLCALITGGGNKLTFGTGTQLKVELNIQNPEPAVYQLKDPRSQDSTL | |
| | CLFTDFDSQINVPKTMESGTFITDKCVLDMKAMDSKSNGAIAWSNQTSFTCQ | |
| | DIFKETNATYPSSDVPCDATLTEKSFETDMNLNFQNLLVIVLRILLLKVAGF | |
| | NLLMTLRLWSS | |
| α chain w/alternative | MHKNPLAAPLLILWFHLDCVSSILNVEQSPQSLHVQEGDSTNFTCSFPSSNF | 1090 |
| signal peptide, Cα | YALHWYRWETAKSPEALFVMTLNGDEKKKGRISATLNTKEGYSYLYIKGSQP | |
| (substituted) | EDSATYLCALITGGGNKLTFGTGTQLKVELNIQNPEPAVYQLKDPRSQDSTL | |
| | CLFTDFDSQINVPKTMESGTFITDKCVLDMKAMDSKSNGAIAWSNQTSFTCQ | |
| | DIFKETNATYPSSDVPCDATLTEKSFETDMNLNFQNLLVIVLRILLLKVAGF | |
| | NLLMTLRLWSS | |
| CDR1β | MNHEY | 2081 |
| CDR2β | SVGEGT | 2082 |
| CDR3β | ASRLQGWNSPLH | 2083 |
| Vβ w/o signal peptide | GVTQTPKFRVLKTGQSMTLLCAQDMNHEYMYWYRQDPGMGLRLIHYSVGEGT | 2084 |
| (SignalP) | TAKGEVPDGYNVSRLKKQNFLLGLESAAPSQTSVYFCASRLQGWNSPLHFGN | |
| | GTRLTVT | |
| Vβ w/o signal peptide | NAGVTQTPKFRVLKTGQSMTLLCAQDMNHEYMYWYRQDPGMGLRLIHYSVGE | 2085 |
| (IMGT) | GTTAKGEVPDGYNVSRLKKQNFLLGLESAAPSQTSVYFCASRLQGWNSPLHF | |
| | GNGTRLTVT | |
| Vβ | MXLGLLCCGAFSLLWAGPVNAGVTQTPKFRVLKTGQSMTLLCAQDMNHEYMY | 2086 |
| | WYRQDPGMGLRLIHYSVGEGTTAKGEVPDGYNVSRLKKQNFLLGLESAAPSQ | 2087 |
| | TSVYFCASRLQGWNSPLHFGNGTRLTVT | |
| | (X = any amino acid) | |
| β chain w/WT signal | MSLGLLCCGAFSLLWAGPVNAGVTQTPKFRVLKTGQSMTLLCAQDMNHEYMY | 2088 |
| peptide, Cβ | WYRQDPGMGLRLIHYSVGEGTTAKGEVPDGYNVSRLKKQNFLLGLESAAPSQ | |
| (substituted) | TSVYFCASRLQGWNSPLHFGNGTRLTVTEDLRNVTPPKVSLFEPSKAEIANK | |
| | QKATLVCLARGFFPDHVELSWWVNGKEVHSGVCTDPQAYKESNYSYCLSSRL | |
| | RVSATFWHNPRNHFRCQVQFHGLSEEDKWPEGSPKPVTQNISAEAWGRADCG | |
| | ITSASYQQGVLSATILYEILLGKATLYAVLVSTLVVMAMVKRKNS | |
| β chain w/alternative | MALGLLCCGAFSLLWAGPVNAGVTQTPKFRVLKTGQSMTLLCAQDMNHEYMY | 2089 |
| signal peptide, Cβ | WYRQDPGMGLRLIHYSVGEGTTAKGEVPDGYNVSRLKKQNFLLGLESAAPSQ | |
| (substituted) | TSVYFCASRLQGWNSPLHFGNGTRLTVTEDLRNVTPPKVSLFEPSKAEIANK | |
| | QKATLVCLARGFFPDHVELSWWVNGKEVHSGVCTDPQAYKESNYSYCLSSRL | |
| | RVSATFWHNPRNHFRCQVQFHGLSEEDKWPEGSPKPVTQNISAEAWGRADCG | |
| | ITSASYQQGVLSATILYEILLGKATLYAVLVSTLVVMAMVKRKNS | |
| β chain w/alternative | MHLGLLCCGAFSLLWAGPVNAGVTQTPKFRVLKTGQSMTLLCAQDMNHEYMY | 2090 |
| signal peptide, Cβ | WYRQDPGMGLRLIHYSVGEGTTAKGEVPDGYNVSRLKKQNFLLGLESAAPSQ | |
| (substituted) | TSVYFCASRLQGWNSPLHFGNGTRLTVTEDLRNVTPPKVSLFEPSKAEIANK | |
| | QKATLVCLARGFFPDHVELSWWVNGKEVHSGVCTDPQAYKESNYSYCLSSRL | |
| | RVSATFWHNPRNHFRCQVQFHGLSEEDKWPEGSPKPVTQNISAEAWGRADCG | |
| | ITSASYQQGVLSATILYEILLGKATLYAVLVSTLVVMAMVKRKNS | |

[0173] In some embodiments, TCR009 interacts with and/or is specific for p53. In some embodiments, the peptide is from a neoantigen of p53. In some embodiments, the neoantigen has the amino acid change R175H relative to the wild type p53 sequence. In some embodiments, TCR009 interacts with the neoantigen in the context of HLA-DRB1*13:01, as described in International Publication No. WO 2019/067243, incorporated herein by reference in its entirety.

TABLE 6J
Amino acid sequences of TCR010.

| | | SEQ |
|---|---|---|
| | | ID |
| Description | Sequence | NO: |
| CDR1α | TTLSN | 1091 |
| CDR2α | LVKSGEV | 1092 |
| CDR3α | AGPGGAGSYQLT | 1093 |
| Vα w/o signal peptide | QQVMQIPQYQHVQEGEDFTTYCNSSTTLSNIQWYKQRPGGHPVFLIQLVKSG | 1094 |
| (SignalP) | EVKKQKRLTFQFGEAKKNSSLHITATQTTDVGTYFCAGPGGAGSYQLTFGKG | |
| | TKLSVIP | |
| Vα w/o signal peptide | GQQVMQIPQYQHVQEGEDFTTYCNSSTTLSNIQWYKQRPGGHPVFLIQLVKS | 1095 |
| (IMGT) | GEVKKQKRLTFQFGEAKKNSSLHITATQTTDVGTYFCAGPGGAGSYQLTFGK | |
| | GTKLSVIP | |
| Vα | MXLITSMLVLWMQLSQVNGQQVMQIPQYQHVQEGEDFTTYCNSSTTLSNIQW | 1096 |
| | YKQRPGGHPVFLIQLVKSGEVKKQKRLTFQFGEAKKNSSLHITATQTTDVGT | 1097 |
| | YFCAGPGGAGSYQLTFGKGTKLSVIP | |
| | (X = any amino acid) | |
| α chain w/WT signal | MLLITSMLVLWMQLSQVNGQQVMQIPQYQHVQEGEDFTTYCNSSTTLSNIQW | 1098 |
| peptide, Cα | YKQRPGGHPVFLIQLVKSGEVKKQKRLTFQFGEAKKNSSLHITATQTTDVGT | |
| (substituted) | YFCAGPGGAGSYQLTFGKGTKLSVIPNIQNPEPAVYQLKDPRSQDSTLCLFT | |
| | DFDSQINVPKTMESGTFITDKCVLDMKAMDSKSNGAIAWSNQTSFTCQDIFK | |
| | ETNATYPSSDVPCDATLTEKSFETDMNLNFQNLLVIVLRILLLKVAGFNLLM | |
| | TLRLWSS | |
| α chain w/alternative | MALITSMLVLWMQLSQVNGQQVMQIPQYQHVQEGEDETTYCNSSTTLSNIQW | 1099 |
| signal peptide, Cα | YKQRPGGHPVFLIQLVKSGEVKKQKRLTFQFGEAKKNSSLHITATQTTDVGT | |
| (substituted) | YFCAGPGGAGSYQLTFGKGTKLSVIPNIQNPEPAVYQLKDPRSQDSTLCLFT | |
| | DFDSQINVPKTMESGTFITDKCVLDMKAMDSKSNGAIAWSNQTSFTCQDIFK | |
| | ETNATYPSSDVPCDATLTEKSFETDMNLNFQNLLVIVLRILLLKVAGFNLLM | |
| | TLRLWSS | |
| α chain w/alternative | MHLITSMLVLWMQLSQVNGQQVMQIPQYQHVQEGEDFTTYCNSSTTLSNIQW | 1100 |
| signal peptide, Cα | YKQRPGGHPVFLIQLVKSGEVKKQKRLTFQFGEAKKNSSLHITATQTTDVGT | |
| (substituted) | YFCAGPGGAGSYQLTFGKGTKLSVIPNIQNPEPAVYQLKDPRSQDSTLCLFT | |
| | DFDSQINVPKTMESGTFITDKCVLDMKAMDSKSNGAIAWSNQTSFTCQDIFK | |
| | ETNATYPSSDVPCDATLTEKSFETDMNLNFQNLLVIVLRILLLKVAGFNLLM | |
| | TLRLWSS | |
| CDR1β | MNHEY | 2091 |
| CDR2β | SMNVEV | 2092 |
| CDR3β | ASSPFVVIGQINEQY | 2093 |
| Vβ w/o signal peptide | QVTQNPRYLITVTGKKLTVTCSQNMNHEYMSWYRQDPGLGLRQIYYSMNVEV | 2094 |
| (SignalP) | TDKGDVPEGYKVSRKEKRNFPLILESPSPNQTSLYFCASSPFVVIGQINEQY | |
| | FGPGTRLTVT | |
| Vβ w/o signal peptide | EAQVTQNPRYLITVTGKKLTVTCSQNMNHEYMSWYRQDPGLGLRQIYYSMNV | 2095 |
| (IMGT) | EVTDKGDVPEGYKVSRKEKRNFPLILESPSPNQTSLYFCASSPFVVIGQINE | |
| | QYFGPGTRLTVT | |
| Vβ | MXPQLLGYVVLCLLGAGPLEAQVTQNPRYLITVTGKKLTVTCSQNMNHEYMS | 2096 |
| | WYRQDPGLGLRQIYYSMNVEVTDKGDVPEGYKVSRKEKRNFPLILESPSPNQ | 2097 |
| | TSLYFCASSPFVVIGQINEQYFGPGTRLTVT | |
| | (X = any amino acid) | |
| β chain w/WT signal | MGPQLLGYVVLCLLGAGPLEAQVTQNPRYLITVTGKKLTVTCSQNMNHEYMS | 2098 |
| peptide, Cβ | WYRQDPGLGLRQIYYSMNVEVTDKGDVPEGYKVSRKEKRNFPLILESPSPNQ | |
| (substituted) | TSLYFCASSPFVVIGQINEQYFGPGTRLTVTEDLRNVTPPKVSLFEPSKAEI | |
| | ANKQKATLVCLARGFFPDHVELSWWVNGKEVHSGVCTDPQAYKESNYSYCLS | |
| | SRLRVSATFWHNPRNHFRCQVQFHGLSEEDKWPEGSPKPVTQNISAEAWGRA | |
| | DCGITSASYQQGVLSATILYEILLGKATLYAVLVSTLVVMAMVKRKNS | |
| β chain w/alternative | MAPQLLGYVVLCLLGAGPLEAQVTQNPRYLITVTGKKLTVTCSQNMNHEYMS | 2099 |
| signal peptide, Cβ | WYRQDPGLGLRQIYYSMNVEVTDKGDVPEGYKVSRKEKRNFPLILESPSPNQ | |
| (substituted) | TSLYFCASSPFVVIGQINEQYFGPGTRLTVTEDLRNVTPPKVSLFEPSKAEI | |
| | ANKQKATLVCLARGFFPDHVELSWWVNGKEVHSGVCTDPQAYKESNYSYCLS | |
| | SRLRVSATFWHNPRNHFRCQVQFHGLSEEDKWPEGSPKPVTQNISAEAWGRA | |
| | DCGITSASYQQGVLSATILYEILLGKATLYAVLVSTLVVMAMVKRKNS | |
| β chain w/alternative | MHPQLLGYVVLCLLGAGPLEAQVTQNPRYLITVTGKKLTVTCSQNMNHEYMS | 2100 |
| signal peptide, Cβ | WYRQDPGLGLRQIYYSMNVEVTDKGDVPEGYKVSRKEKRNFPLILESPSPNQ | |
| (substituted) | TSLYFCASSPFVVIGQINEQYFGPGTRLTVTEDLRNVTPPKVSLFEPSKAEI | |
| | ANKQKATLVCLARGFFPDHVELSWWVNGKEVHSGVCTDPQAYKESNYSYCLS | |
| | SRLRVSATFWHNPRNHFRCQVQFHGLSEEDKWPEGSPKPVTQNISAEAWGRA | |
| | DCGITSASYQQGVLSATILYEILLGKATLYAVLVSTLVVMAMVKRKNS | |

[0174] In some embodiments, TCR010 interacts with and/or is specific for p53. In some embodiments, the peptide is from a neoantigen of p53. In some embodiments, the neoantigen has the amino acid change R175H relative to the wild type p53 sequence. In some embodiments, TCR010 interacts with the neoantigen in the context of HLA-DRB1*13:01, as described in International Publication No. WO 2020/264269, incorporated herein by reference in its entirety.

TABLE 6K
Amino acid sequences of TCR011.

| | | SEQ |
|---|---|---|
| | | ID |
| Description | Sequence | NO: |
| CDR1α | TISGNEY | 1101 |
| CDR2α | GLKNN | 1102 |
| CDR3α | IVRARANAGGTSYGKLT | 1103 |
| Vα w/o signal peptide | KTTQPPSMDCAEGRAANLPCNHSTISGNEYVYWYRQIHSQGPQYIIHGLKNN | 1104 |
| (SignalP) | ETNEMASLIITEDRKSSTLILPHATLRDTAVYYCIVRARANAGGTSYGKLTF | |
| | GQGTILTVHP | |
| Vα w/o signal peptide | DAKTTQPPSMDCAEGRAANLPCNHSTISGNEYVYWYRQIHSQGPQYIIHGLK | 1105 |
| (IMGT) | NNETNEMASLIITEDRKSSTLILPHATLRDTAVYYCIVRARANAGGTSYGKL | |
| | TFGQGTILTVHP | |
| Vα | MXLVARVTVFLTFGTIIDAKTTQPPSMDCAEGRAANLPCNHSTISGNEYVYW | 1106 |
| | YRQIHSQGPQYIIHGLKNNETNEMASLIITEDRKSSTLILPHATLRDTAVYY | 1107 |
| | CIVRARANAGGTSYGKLTFGQGTILTVHP | |
| | (X = any amino acid) | |
| α chain w/WT signal | MRLVARVTVFLTFGTIIDAKTTQPPSMDCAEGRAANLPCNHSTISGNEYVYW | 1108 |
| peptide, Cα | YRQIHSQGPQYIIHGLKNNETNEMASLIITEDRKSSTLILPHATLRDTAVYY | |
| (substituted) | CIVRARANAGGTSYGKLTFGQGTILTVHPNIQNPEPAVYQLKDPRSQDSTLC | |
| | LFTDFDSQINVPKTMESGTFITDKCVLDMKAMDSKSNGAIAWSNQTSFTCQD | |
| | IFKETNATYPSSDVPCDATLTEKSFETDMNLNFQNLLVIVLRILLLKVAGFN | |
| | LLMTLRLWSS | |
| α chain w/alternative | MALVARVTVFLTFGTIIDAKTTQPPSMDCAEGRAANLPCNHSTISGNEYVYW | 1109 |
| signal peptide, Cα | YRQIHSQGPQYIIHGLKNNETNEMASLIITEDRKSSTLILPHATLRDTAVYY | |
| (substituted) | CIVRARANAGGTSYGKLTFGQGTILTVHPNIQNPEPAVYQLKDPRSQDSTLC | |
| | LFTDFDSQINVPKTMESGTFITDKCVLDMKAMDSKSNGAIAWSNQTSFTCQD | |
| | IFKETNATYPSSDVPCDATLTEKSFETDMNLNFQNLLVIVLRILLLKVAGFN | |
| | LLMTLRLWSS | |
| α chain w/alternative | MHLVARVTVFLTFGTIIDAKTTQPPSMDCAEGRAANLPCNHSTISGNEYVYW | 1110 |
| signal peptide, Cα | YRQIHSQGPQYIIHGLKNNETNEMASLIITEDRKSSTLILPHATLRDTAVYY | |
| (substituted) | CIVRARANAGGTSYGKLTFGQGTILTVHPNIQNPEPAVYQLKDPRSQDSTLC | |
| | LFTDFDSQINVPKTMESGTFITDKCVLDMKAMDSKSNGAIAWSNQTSFTCQD | |
| | IFKETNATYPSSDVPCDATLTEKSFETDMNLNFQNLLVIVLRILLLKVAGFN | |
| | LLMTLRLWSS | |
| CDR1β | LNHDA | 2101 |
| CDR2β | SQIVND | 2102 |
| CDR3β | ATRTGNEAF | 2103 |
| Vβ w/o signal peptide | GITQSPKYLFRKEGQNVTLSCEQNLNHDAMYWYRQDPGQGLRLIYYSQIVND | 2104 |
| (SignalP) | FQKGDIAEGYSVSREKKESFPLTVTSAQKNPTAFYLCATRTGNEAFFGQGTR | |
| | LTVV | |
| Vβ w/o signal peptide | DGGITQSPKYLFRKEGQNVTLSCEQNLNHDAMYWYRQDPGQGLRLIYYSQIV | 2105 |
| (IMGT) | NDFQKGDIAEGYSVSREKKESFPLTVTSAQKNPTAFYLCATRTGNEAFFGQG | |
| | TRLTVV | |
| Vβ | MXNQVLCCVVLCFLGANTVDGGITQSPKYLFRKEGQNVTLSCEQNLNHDAMY | 2106 |
| | WYRQDPGQGLRLIYYSQIVNDFQKGDIAEGYSVSREKKESFPLTVTSAQKNP | 2107 |
| | TAFYLCATRTGNEAFFGQGTRLTVV | |
| | (X = any amino acid) | |
| β chain w/WT signal | MSNQVLCCVVLCFLGANTVDGGITQSPKYLFRKEGQNVTLSCEQNLNHDAMY | 2108 |
| peptide, Cβ | WYRQDPGQGLRLIYYSQIVNDFQKGDIAEGYSVSREKKESFPLTVTSAQKNP | |
| (substituted) | TAFYLCATRTGNEAFFGQGTRLTVVEDLRNVTPPKVSLFEPSKAEIANKQKA | |
| | TLVCLARGFFPDHVELSWWVNGKEVHSGVCTDPQAYKESNYSYCLSSRLRVS | |
| | ATFWHNPRNHFRCQVQFHGLSEEDKWPEGSPKPVTQNISAEAWGRADCGITS | |
| | ASYQQGVLSATILYEILLGKATLYAVLVSTLVVMAMVKRKNS | |
| β chain w/alternative | MANQVLCCVVLCFLGANTVDGGITQSPKYLFRKEGQNVTLSCEQNLNHDAMY | 2109 |
| signal peptide, Cβ | WYRQDPGQGLRLIYYSQIVNDFQKGDIAEGYSVSREKKESFPLTVTSAQKNP | |
| (substituted) | TAFYLCATRTGNEAFFGQGTRLTVVEDLRNVTPPKVSLFEPSKAEIANKQKA | |
| | TLVCLARGFFPDHVELSWWVNGKEVHSGVCTDPQAYKESNYSYCLSSRLRVS | |
| | ATFWHNPRNHFRCQVQFHGLSEEDKWPEGSPKPVTQNISAEAWGRADCGITS | |
| | ASYQQGVLSATILYEILLGKATLYAVLVSTLVVMAMVKRKNS | |
| β chain w/alternative | MHNQVLCCVVLCFLGANTVDGGITQSPKYLFRKEGQNVTLSCEQNLNHDAMY | 2110 |
| signal peptide, Cβ | WYRQDPGQGLRLIYYSQIVNDFQKGDIAEGYSVSREKKESFPLTVTSAQKNP | |
| (substituted) | TAFYLCATRTGNEAFFGQGTRLTVVEDLRNVTPPKVSLFEPSKAEIANKQKA | |
| | TLVCLARGFFPDHVELSWWVNGKEVHSGVCTDPQAYKESNYSYCLSSRLRVS | |
| | ATFWHNPRNHFRCQVQFHGLSEEDKWPEGSPKPVTQNISAEAWGRADCGITS | |
| | ASYQQGVLSATILYEILLGKATLYAVLVSTLVVMAMVKRKNS | |

[0175] In some embodiments, TCR011 interacts with and/or is specific for p53. In some embodiments, the peptide is from a neoantigen of p53. In some embodiments, the neoantigen has the amino acid change R175H relative to the wild type p53 sequence. In some embodiments, TCR011 interacts with the neoantigen in the context of HLA-DRB1*13:01, as described in International Publication No. WO 2020/264269, incorporated herein by reference in its entirety.

TABLE 6L
Amino acid sequences of TCR012.

| | | SEQ |
|---|---|---|
| | | ID |
| Description | Sequence | NO: |
| CDR1α | VSNAYN | 1111 |
| CDR2α | GSKP | 1112 |
| CDR3α | AVEDRRRTALI | 1113 |
| Vα w/o signal peptide | KDQVFQPSTVASSEGAVVEIFCNHSVSNAYNFFWYLHFPGCAPRLLVKGSKP | 1114 |
| (SignalP) | SQQGRYNMTYERFSSSLLILQVREADAAVYYCAVEDRRRTALIFGKGTTLSV | |
| | SS | |
| Vα w/o signal peptide | KDQVFQPSTVASSEGAVVEIFCNHSVSNAYNFFWYLHFPGCAPRLLVKGSKP | 1115 |
| (IMGT) | SQQGRYNMTYERFSSSLLILQVREADAAVYYCAVEDRRRTALIFGKGTTLSV | |
| | SS | |
| Vα | MXLQSTLGAVWLGLLLNSLWKVAESKDQVFQPSTVASSEGAVVEIFCNHSVS | 1116 |
| | NAYNFFWYLHFPGCAPRLLVKGSKPSQQGRYNMTYERFSSSLLILQVREADA | 1117 |
| | AVYYCAVEDRRRTALIFGKGTTLSVSS | |
| | (X = any amino acid) | |
| α chain w/WT signal | MALQSTLGAVWLGLLLNSLWKVAESKDQVFQPSTVASSEGAVVEIFCNHSVS | 1118 |
| peptide, Cα | NAYNFFWYLHFPGCAPRLLVKGSKPSQQGRYNMTYERFSSSLLILQVREADA | 1119 |
| (substituted) | AVYYCAVEDRRRTALIFGKGTTLSVSSNIQNPEPAVYQLKDPRSQDSTLCLF | |
| | TDFDSQINVPKTMESGTFITDKCVLDMKAMDSKSNGAIAWSNQTSFTCQDIF | |
| | KETNATYPSSDVPCDATLTEKSFETDMNLNFQNLLVIVLRILLLKVAGFNLL | |
| | MTLRLWSS | |
| α chain w/alternative | MHLQSTLGAVWLGLLLNSLWKVAESKDQVFQPSTVASSEGAVVEIFCNHSVS | 1120 |
| signal peptide, Cα | NAYNFFWYLHFPGCAPRLLVKGSKPSQQGRYNMTYERFSSSLLILQVREADA | |
| (substituted) | AVYYCAVEDRRRTALIFGKGTTLSVSSNIQNPEPAVYQLKDPRSQDSTLCLF | |
| | TDFDSQINVPKTMESGTFITDKCVLDMKAMDSKSNGAIAWSNQTSFTCQDIF | |
| | KETNATYPSSDVPCDATLTEKSFETDMNLNFQNLLVIVLRILLLKVAGFNLL | |
| | MTLRLWSS | |
| CDR1β | SNHLY | 2111 |
| CDR2β | FYNNEI | 2112 |
| CDR3β | ASSEYQSQSNEQF | 2113 |
| Vβ w/o signal peptide | EPEVTQTPSHQVTQMGQEVILRCVPISNHLYFYWYRQILGQKVEFLVSFYNN | 2114 |
| (SignalP) | EISEKSEIFDDQFSVERPDGSNFTLKIRSTKLEDSAMYFCASSEYQSQSNEQ | |
| | FFGPGTRLTVL | |
| Vβ w/o signal peptide | EPEVTQTPSHQVTQMGQEVILRCVPISNHLYFYWYRQILGQKVEFLVSFYNN | 2115 |
| (IMGT) | EISEKSEIFDDQFSVERPDGSNFTLKIRSTKLEDSAMYFCASSEYQSQSNEQ | |
| | FFGPGTRLTVL | |
| Vβ | MXTWLVCWAIFSLLKAGLTEPEVTQTPSHQVTQMGQEVILRCVPISNHLYFY | 2116 |
| | WYRQILGQKVEFLVSFYNNEISEKSEIFDDQFSVERPDGSNFTLKIRSTKLE | 2117 |
| | DSAMYFCASSEYQSQSNEQFFGPGTRLTVL | |
| | (X = any amino acid) | |
| β chain w/WT signal | MDTWLVCWAIFSLLKAGLTEPEVTQTPSHQVTQMGQEVILRCVPISNHLYFY | 2118 |
| peptide, Cβ | WYRQILGQKVEFLVSFYNNEISEKSEIFDDQFSVERPDGSNFTLKIRSTKLE | |
| (substituted) | DSAMYFCASSEYQSQSNEQFFGPGTRLTVLEDLRNVTPPKVSLFEPSKAEIA | |
| | NKQKATLVCLARGFFPDHVELSWWVNGKEVHSGVCTDPQAYKESNYSYCLSS | |
| | RLRVSATFWHNPRNHFRCQVQFHGLSEEDKWPEGSPKPVTQNISAEAWGRAD | |
| | CGITSASYQQGVLSATILYEILLGKATLYAVLVSTLVVMAMVKRKNS | |
| β chain w/alternative | MATWLVCWAIFSLLKAGLTEPEVTQTPSHQVTQMGQEVILRCVPISNHLYFY | 2119 |
| signal peptide, Cβ | WYRQILGQKVEFLVSFYNNEISEKSEIFDDQFSVERPDGSNFTLKIRSTKLE | |
| (substituted) | DSAMYFCASSEYQSQSNEQFFGPGTRLTVLEDLRNVTPPKVSLFEPSKAEIA | |
| | NKQKATLVCLARGFFPDHVELSWWVNGKEVHSGVCTDPQAYKESNYSYCLSS | |
| | RLRVSATFWHNPRNHFRCQVQFHGLSEEDKWPEGSPKPVTQNISAEAWGRAD | |
| | CGITSASYQQGVLSATILYEILLGKATLYAVLVSTLVVMAMVKRKNS | |
| β chain w/alternative | MHTWLVCWAIFSLLKAGLTEPEVTQTPSHQVTQMGQEVILRCVPISNHLYFY | 2120 |
| signal peptide, Cβ | WYRQILGQKVEFLVSFYNNEISEKSEIFDDQFSVERPDGSNFTLKIRSTKLE | |
| (substituted) | DSAMYFCASSEYQSQSNEQFFGPGTRLTVLEDLRNVTPPKVSLFEPSKAEIA | |
| | NKQKATLVCLARGFFPDHVELSWWVNGKEVHSGVCTDPQAYKESNYSYCLSS | |
| | RLRVSATFWHNPRNHFRCQVQFHGLSEEDKWPEGSPKPVTQNISAEAWGRAD | |
| | CGITSASYQQGVLSATILYEILLGKATLYAVLVSTLVVMAMVKRKNS | |

[0176] In some embodiments, TCR012 interacts with and/or is specific for p53. In some embodiments, the peptide is from a neoantigen of p53. In some embodiments, the neoantigen has the amino acid change R175H relative to the wild type p53 sequence. In some embodiments, TCR012 interacts with the neoantigen in the context of HLA-DRB1*13:01, as described in International Publication No. WO 2020/264269, incorporated herein by reference in its entirety.

TABLE 6M
Amino acid sequences of TCR013.

| | | SEQ |
|---|---|---|
| | | ID |
| Description | Sequence | NO: |
| CDR1α | TISGTDY | 1121 |
| CDR2α | GLTSN | 1122 |
| CDR3α | ILRDNNARLM | 1123 |
| Vα w/o signal peptide | KTTQPNSMESNEEEPVHLPCNHSTISGTDYIHWYRQLPSQGPEYVIHGLTSN | 1124 |
| (SignalP) | VNNRMASLAIAEDRKSSTLILHRATLRDAAVYYCILRDNNARLMFGDGTQLV | |
| | VKP | |
| Vα w/o signal peptide | DAKTTQPNSMESNEEEPVHLPCNHSTISGTDYIHWYRQLPSQGPEYVIHGLT | 1125 |
| (IMGT) | SNVNNRMASLAIAEDRKSSTLILHRATLRDAAVYYCILRDNNARLMFGDGTQ | |
| | LVVKP | |
| Vα | MXLVTSITVLLSLGIMGDAKTTQPNSMESNEEEPVHLPCNHSTISGTDYIHW | 1126 |
| | YRQLPSQGPEYVIHGLTSNVNNRMASLAIAEDRKSSTLILHRATLRDAAVYY | 1127 |
| | CILRDNNARLMFGDGTQLVVKP | |
| | (X = any amino acid) | |
| α chain w/WT signal | MKLVTSITVLLSLGIMGDAKTTQPNSMESNEEEPVHLPCNHSTISGTDYIHW | 1128 |
| peptide, Cα | YRQLPSQGPEYVIHGLTSNVNNRMASLAIAEDRKSSTLILHRATLRDAAVYY | |
| (substituted) | CILRDNNARLMFGDGTQLVVKPNIQNPEPAVYQLKDPRSQDSTLCLFTDFDS | |
| | QINVPKTMESGTFITDKCVLDMKAMDSKSNGAIAWSNQTSFTCQDIFKETNA | |
| | TYPSSDVPCDATLTEKSFETDMNLNFQNLLVIVLRILLLKVAGFNLLMTLRL | |
| | WSS | |
| α chain w/alternative | MALVTSITVLLSLGIMGDAKTTQPNSMESNEEEPVHLPCNHSTISGTDYIHW | 1129 |
| signal peptide, Cα | YRQLPSQGPEYVIHGLTSNVNNRMASLAIAEDRKSSTLILHRATLRDAAVYY | |
| (substituted) | CILRDNNARLMFGDGTQLVVKPNIQNPEPAVYQLKDPRSQDSTLCLFTDFDS | |
| | QINVPKTMESGTFITDKCVLDMKAMDSKSNGAIAWSNQTSFTCQDIFKETNA | |
| | TYPSSDVPCDATLTEKSFETDMNLNFQNLLVIVLRILLLKVAGFNLLMTLRL | |
| | WSS | |
| α chain w/alternative | MHLVTSITVLLSLGIMGDAKTTQPNSMESNEEEPVHLPCNHSTISGTDYIHW | 1130 |
| signal peptide, Cα | YRQLPSQGPEYVIHGLTSNVNNRMASLAIAEDRKSSTLILHRATLRDAAVYY | |
| (substituted) | CILRDNNARLMFGDGTQLVVKPNIQNPEPAVYQLKDPRSQDSTLCLFTDFDS | |
| | QINVPKTMESGTFITDKCVLDMKAMDSKSNGAIAWSNQTSFTCQDIFKETNA | |
| | TYPSSDVPCDATLTEKSFETDMNLNFQNLLVIVLRILLLKVAGFNLLMTLRL | |
| | WSS | |
| CDR1β | MNHEY | 2121 |
| CDR2β | SMNVEV | 2122 |
| CDR3β | ASGLVGFNQPQH | 2123 |
| Vβ w/o signal peptide | QVTQNPRYLITVTGKKLTVTCSQNMNHEYMSWYRQDPGLGLRQIYYSMNVEV | 2124 |
| (SignalP) | TDKGDVPEGYKVSRKEKRNFPLILESPSPNQTSLYFCASGLVGFNQPQHFGD | |
| | GTRLSIL | |
| Vβ w/o signal peptide | EAQVTQNPRYLITVTGKKLTVTCSQNMNHEYMSWYRQDPGLGLRQIYYSMNV | 2125 |
| (IMGT) | EVTDKGDVPEGYKVSRKEKRNFPLILESPSPNQTSLYFCASGLVGFNQPQHF | |
| | GDGTRLSIL | |
| Vβ | MXPQLLGYVVLCLLGAGPLEAQVTQNPRYLITVTGKKLTVTCSQNMNHEYMS | 2126 |
| | WYRQDPGLGLRQIYYSMNVEVTDKGDVPEGYKVSRKEKRNFPLILESPSPNQ | 2127 |
| | TSLYFCASGLVGFNQPQHFGDGTRLSIL | |
| | (X = any amino acid) | |
| β chain w/WT signal | MGPQLLGYVVLCLLGAGPLEAQVTQNPRYLITVTGKKLTVTCSQNMNHEYMS | 2128 |
| peptide, Cβ | WYRQDPGLGLRQIYYSMNVEVTDKGDVPEGYKVSRKEKRNFPLILESPSPNQ | |
| (substituted) | TSLYFCASGLVGFNQPQHFGDGTRLSILEDLRNVTPPKVSLFEPSKAEIANK | |
| | QKATLVCLARGFFPDHVELSWWVNGKEVHSGVCTDPQAYKESNYSYCLSSRL | |
| | RVSATFWHNPRNHFRCQVQFHGLSEEDKWPEGSPKPVTQNISAEAWGRADCG | |
| | ITSASYQQGVLSATILYEILLGKATLYAVLVSTLVVMAMVKRKNS | |
| β chain w/alternative | MAPQLLGYVVLCLLGAGPLEAQVTQNPRYLITVTGKKLTVTCSQNMNHEYMS | 2129 |
| signal peptide, Cβ | WYRQDPGLGLRQIYYSMNVEVTDKGDVPEGYKVSRKEKRNFPLILESPSPNQ | |
| (substituted) | TSLYFCASGLVGFNQPQHFGDGTRLSILEDLRNVTPPKVSLFEPSKAEIANK | |
| | QKATLVCLARGFFPDHVELSWWVNGKEVHSGVCTDPQAYKESNYSYCLSSRL | |
| | RVSATFWHNPRNHFRCQVQFHGLSEEDKWPEGSPKPVTQNISAEAWGRADCG | |
| | ITSASYQQGVLSATILYEILLGKATLYAVLVSTLVVMAMVKRKNS | |
| β chain w/alternative | MHPQLLGYVVLCLLGAGPLEAQVTQNPRYLITVTGKKLTVTCSQNMNHEYMS | 2130 |
| signal peptide, Cβ | WYRQDPGLGLRQIYYSMNVEVTDKGDVPEGYKVSRKEKRNFPLILESPSPNQ | |
| (substituted) | TSLYFCASGLVGFNQPQHFGDGTRLSILEDLRNVTPPKVSLFEPSKAEIANK | |
| | QKATLVCLARGFFPDHVELSWWVNGKEVHSGVCTDPQAYKESNYSYCLSSRL | |
| | RVSATFWHNPRNHFRCQVQFHGLSEEDKWPEGSPKPVTQNISAEAWGRADCG | |
| | ITSASYQQGVLSATILYEILLGKATLYAVLVSTLVVMAMVKRKNS | |

[0177] In some embodiments, TCR013 interacts with and/or is specific for p53. In some embodiments, the peptide is from a neoantigen of p53. In some embodiments, the neoantigen has the amino acid change R175H relative to the wild type p53 sequence. In some embodiments, TCR013 interacts with the neoantigen in the context of HLA-DRB1*13:01, as described in International Publication No. WO 2020/264269, incorporated herein by reference in its entirety.

TABLE 6N
Amino acid sequences of TCR014

| | | SEQ |
|---|---|---|
| | | ID |
| Description | Sequence | NO: |
| CDR1α | VSGNPY | 1131 |
| CDR2α | YITGDNLV | 1132 |
| CDR3α | AVRDGSATSGTYKYI | 1133 |
| Vα w/o signal peptide | QSVAQPEDQVNVAEGNPLTVKCTYSVSGNPYLFWYVQYPNRGLQFLLKYITG | 1134 |
| (SignalP) | DNLVKGSYGFEAEFNKSQTSFHLKKPSALVSDSALYFCAVRDGSATSGTYKY | |
| | IFGTGTRLKVLA | |
| Vα w/o signal peptide | AQSVAQPEDQVNVAEGNPLTVKCTYSVSGNPYLFWYVQYPNRGLQFLLKYIT | 1135 |
| (IMGT) | GDNLVKGSYGFEAEFNKSQTSFHLKKPSALVSDSALYFCAVRDGSATSGTYK | |
| | YIFGTGTRLKVLA | |
| Vα | MXSAPISMLAMLFTLSGLRAQSVAQPEDQVNVAEGNPLTVKCTYSVSGNPYL | 1136 |
| | FWYVQYPNRGLQFLLKYITGDNLVKGSYGFEAEFNKSQTSFHLKKPSALVSD | 1137 |
| | SALYFCAVRDGSATSGTYKYIFGTGTRLKVLA | |
| | (X = any amino acid) | |
| α chain w/WT signal | MASAPISMLAMLFTLSGLRAQSVAQPEDQVNVAEGNPLTVKCTYSVSGNPYL | 1138 |
| peptide, Cα | FWYVQYPNRGLQFLLKYITGDNLVKGSYGFEAEFNKSQTSFHLKKPSALVSD | 1139 |
| (substituted) | SALYFCAVRDGSATSGTYKYIFGTGTRLKVLANIQNPEPAVYQLKDPRSQDS | |
| | TLCLFTDFDSQINVPKTMESGTFITDKCVLDMKAMDSKSNGAIAWSNQTSFT | |
| | CQDIFKETNATYPSSDVPCDATLTEKSFETDMNLNFQNLLVIVLRILLLKVA | |
| | GFNLLMTLRLWSS | |
| α chain w/alternative | MHSAPISMLAMLFTLSGLRAQSVAQPEDQVNVAEGNPLTVKCTYSVSGNPYL | 1140 |
| signal peptide, Cα | FWYVQYPNRGLQFLLKYITGDNLVKGSYGFEAEFNKSQTSFHLKKPSALVSD | |
| (substituted) | SALYFCAVRDGSATSGTYKYIFGTGTRLKVLANIQNPEPAVYQLKDPRSQDS | |
| | TLCLFTDFDSQINVPKTMESGTFITDKCVLDMKAMDSKSNGAIAWSNQTSFT | |
| | CQDIFKETNATYPSSDVPCDATLTEKSFETDMNLNFQNLLVIVLRILLLKVA | |
| | GFNLLMTLRLWSS | |
| CDR1β | SEHNR | 2131 |
| CDR2β | FQNEAQ | 2132 |
| CDR3β | ASSPGLAYEQY | 2133 |
| Vβ w/o signal peptide | DTGVSQDPRHKITKRGQNVTFRCDPISEHNRLYWYRQTLGQGPEFLTYFQNE | 2134 |
| (SignalP) | AQLEKSRLLSDRFSAERPKGSFSTLEIQRTEQGDSAMYLCASSPGLAYEQYF | |
| | GPGTRLTVT | |
| Vβ w/o signal peptide | DTGVSQDPRHKITKRGQNVTFRCDPISEHNRLYWYRQTLGQGPEFLTYFQNE | 2135 |
| (IMGT) | AQLEKSRLLSDRFSAERPKGSFSTLEIQRTEQGDSAMYLCASSPGLAYEQYF | |
| | GPGTRLTVT | |
| Vβ | MXTSLLCWMALCLLGADHADTGVSQDPRHKITKRGQNVTFRCDPISEHNRLY | 2136 |
| | WYRQTLGQGPEFLTYFQNEAQLEKSRLLSDRESAERPKGSFSTLEIQRTEQG | 2137 |
| | DSAMYLCASSPGLAYEQYFGPGTRLTVT | |
| | (X = any amino acid) | |
| β chain w/WT signal | MGTSLLCWMALCLLGADHADTGVSQDPRHKITKRGQNVTFRCDPISEHNRLY | 2138 |
| peptide, Cβ | WYRQTLGQGPEFLTYFQNEAQLEKSRLLSDRFSAERPKGSFSTLEIQRTEQG | |
| (substituted) | DSAMYLCASSPGLAYEQYFGPGTRLTVTEDLRNVTPPKVSLFEPSKAEIANK | |
| | QKATLVCLARGFFPDHVELSWWVNGKEVHSGVCTDPQAYKESNYSYCLSSRL | |
| | RVSATFWHNPRNHFRCQVQFHGLSEEDKWPEGSPKPVTQNISAEAWGRADCG | |
| | ITSASYQQGVLSATILYEILLGKATLYAVLVSTLVVMAMVKRKNS | |
| β chain w/alternative | MATSLLCWMALCLLGADHADTGVSQDPRHKITKRGQNVTFRCDPISEHNRLY | 2139 |
| signal peptide, Cβ | WYRQTLGQGPEFLTYFQNEAQLEKSRLLSDRFSAERPKGSFSTLEIQRTEQG | |
| (substituted) | DSAMYLCASSPGLAYEQYFGPGTRLTVTEDLRNVTPPKVSLFEPSKAEIANK | |
| | QKATLVCLARGFFPDHVELSWWVNGKEVHSGVCTDPQAYKESNYSYCLSSRL | |
| | RVSATFWHNPRNHFRCQVQFHGLSEEDKWPEGSPKPVTQNISAEAWGRADCG | |
| | ITSASYQQGVLSATILYEILLGKATLYAVLVSTLVVMAMVKRKNS | |
| β chain w/alternative | MHTSLLCWMALCLLGADHADTGVSQDPRHKITKRGQNVTFRCDPISEHNRLY | 2140 |
| signal peptide, Cβ | WYRQTLGQGPEFLTYFQNEAQLEKSRLLSDRFSAERPKGSFSTLEIQRTEQG | |
| (substituted) | DSAMYLCASSPGLAYEQYFGPGTRLTVTEDLRNVTPPKVSLFEPSKAEIANK | |
| | QKATLVCLARGFFPDHVELSWWVNGKEVHSGVCTDPQAYKESNYSYCLSSRL | |
| | RVSATFWHNPRNHFRCQVQFHGLSEEDKWPEGSPKPVTQNISAEAWGRADCG | |
| | ITSASYQQGVLSATILYEILLGKATLYAVLVSTLVVMAMVKRKNS | |

[0178] In some embodiments, TCR014 interacts with and/or is specific for p53. In some embodiments, the peptide is from a neoantigen of p53. In some embodiments, the neoantigen has the amino acid change Y220C relative to the wild type p53 sequence. In some embodiments, TCR014 interacts with the neoantigen in the context of HLA-A*02:01, as described in International Publication No. WO 2020/264269, incorporated herein by reference in its entirety.

TABLE 6O
Amino acid sequences of TCR015.

| | | SEQ |
|---|---|---|
| | | ID |
| Description | Sequence | NO: |
| CDR1α | DRGSQS | 1141 |
| CDR2α | IYSNGD | 1142 |
| CDR3α | AWNSGGSNYKLT | 1143 |
| Vα w/o signal peptide | QQKEVEQNSGPLSVPEGAIASLNCTYSDRGSQSFFWYRQYSGKSPELIMFIY | 1144 |
| (SignalP) | SNGDKEDGRFTAQLNKASQYVSLLIRDSQPSDSATYLCAWNSGGSNYKLTFG | |
| | KGTLLTVNP | |
| Vα w/o signal peptide | QKEVEQNSGPLSVPEGAIASLNCTYSDRGSQSFFWYRQYSGKSPELIMFIYS | 1145 |
| (IMGT) | NGDKEDGRFTAQLNKASQYVSLLIRDSQPSDSATYLCAWNSGGSNYKLTFGK | |
| | GTLLTVNP | |
| Vα | MXSLRVLLVILWLQLSWVWSQQKEVEQNSGPLSVPEGAIASLNCTYSDRGSQ | 1146 |
| | SFFWYRQYSGKSPELIMFIYSNGDKEDGRFTAQLNKASQYVSLLIRDSQPSD | 1147 |
| | SATYLCAWNSGGSNYKLTFGKGTLLTVNP | |
| | (X = any amino acid) | |
| α chain w/WT signal | MKSLRVLLVILWLQLSWVWSQQKEVEQNSGPLSVPEGAIASLNCTYSDRGSQ | 1148 |
| peptide, Cα | SFFWYRQYSGKSPELIMFIYSNGDKEDGRFTAQLNKASQYVSLLIRDSQPSD | |
| (substituted) | SATYLCAWNSGGSNYKLTFGKGTLLTVNPNIQNPEPAVYQLKDPRSQDSTLC | |
| | LFTDFDSQINVPKTMESGTFITDKCVLDMKAMDSKSNGAIAWSNQTSFTCQD | |
| | IFKETNATYPSSDVPCDATLTEKSFETDMNLNFQNLLVIVLRILLLKVAGFN | |
| | LLMTLRLWSS | |
| α chain w/alternative | MASLRVLLVILWLQLSWVWSQQKEVEQNSGPLSVPEGAIASLNCTYSDRGSQ | 1149 |
| signal peptide, Cα | SFFWYRQYSGKSPELIMFIYSNGDKEDGRFTAQLNKASQYVSLLIRDSQPSD | |
| (substituted) | SATYLCAWNSGGSNYKLTFGKGTLLTVNPNIQNPEPAVYQLKDPRSQDSTLC | |
| | LFTDFDSQINVPKTMESGTFITDKCVLDMKAMDSKSNGAIAWSNQTSFTCQD | |
| | IFKETNATYPSSDVPCDATLTEKSFETDMNLNFQNLLVIVLRILLLKVAGFN | |
| | LLMTLRLWSS | |
| α chain w/alternative | MHSLRVLLVILWLQLSWVWSQQKEVEQNSGPLSVPEGAIASLNCTYSDRGSQ | 1150 |
| signal peptide, Cα | SFFWYRQYSGKSPELIMFIYSNGDKEDGRFTAQLNKASQYVSLLIRDSQPSD | |
| (substituted) | SATYLCAWNSGGSNYKLTFGKGTLLTVNPNIQNPEPAVYQLKDPRSQDSTLC | |
| | LFTDFDSQINVPKTMESGTFITDKCVLDMKAMDSKSNGAIAWSNQTSFTCQD | |
| | IFKETNATYPSSDVPCDATLTEKSFETDMNLNFQNLLVIVLRILLLKVAGFN | |
| | LLMTLRLWSS | |
| CDR1β | MNHEY | 2141 |
| CDR2β | SVGEGT | 2142 |
| CDR3β | ASSYSQAWGQPQH | 2143 |
| Vβ w/o signal peptide | GVTQTPKFRVLKTGQSMTLLCAQDMNHEYMYWYRQDPGMGLRLIHYSVGEGT | 2144 |
| (SignalP) | TAKGEVPDGYNVSRLKKQNFLLGLESAAPSQTSVYFCASSYSQAWGQPQHFG | |
| | DGTRLSIL | |
| Vβ w/o signal peptide | NAGVTQTPKFRVLKTGQSMTLLCAQDMNHEYMYWYRQDPGMGLRLIHYSVGE | 2145 |
| (IMGT) | GTTAKGEVPDGYNVSRLKKQNFLLGLESAAPSQTSVYFCASSYSQAWGQPQH | |
| | FGDGTRLSIL | |
| Vβ | MXLGLLCCGAFSLLWAGPVNAGVTQTPKFRVLKTGQSMTLLCAQDMNHEYMY | 2146 |
| | WYRQDPGMGLRLIHYSVGEGTTAKGEVPDGYNVSRLKKQNFLLGLESAAPSQ | 2147 |
| | TSVYFCASSYSQAWGQPQHFGDGIRLSIL | |
| | (X = any amino acid) | |
| β chain w/WT signal | MSLGLLCCGAFSLLWAGPVNAGVTQTPKFRVLKTGQSMTLLCAQDMNHEYMY | 2148 |
| peptide, Cβ | WYRQDPGMGLRLIHYSVGEGTTAKGEVPDGYNVSRLKKQNFLLGLESAAPSQ | |
| (substituted) | TSVYFCASSYSQAWGQPQHFGDGTRLSILEDLRNVTPPKVSLFEPSKAEIAN | |
| | KQKATLVCLARGFFPDHVELSWWVNGKEVHSGVCTDPQAYKESNYSYCLSSR | |
| | LRVSATFWHNPRNHFRCQVQFHGLSEEDKWPEGSPKPVTQNISAEAWGRADC | |
| | GITSASYQQGVLSATILYEILLGKATLYAVLVSTLVVMAMVKRKNS | |
| β chain w/alternative | MALGLLCCGAFSLLWAGPVNAGVTQTPKFRVLKTGQSMTLLCAQDMNHEYMY | 2149 |
| signal peptide, Cβ | WYRQDPGMGLRLIHYSVGEGTTAKGEVPDGYNVSRLKKQNFLLGLESAAPSQ | |
| (substituted) | TSVYFCASSYSQAWGQPQHFGDGTRLSILEDLRNVTPPKVSLFEPSKAEIAN | |
| | KQKATLVCLARGFFPDHVELSWWVNGKEVHSGVCTDPQAYKESNYSYCLSSR | |
| | LRVSATFWHNPRNHFRCQVQFHGLSEEDKWPEGSPKPVTQNISAEAWGRADC | |
| | GITSASYQQGVLSATILYEILLGKATLYAVLVSTLVVMAMVKRKNS | |
| β chain w/alternative | MHLGLLCCGAFSLLWAGPVNAGVTQTPKFRVLKTGQSMTLLCAQDMNHEYMY | 2150 |
| signal peptide, Cβ | WYRQDPGMGLRLIHYSVGEGTTAKGEVPDGYNVSRLKKQNFLLGLESAAPSQ | |
| (substituted) | TSVYFCASSYSQAWGQPQHFGDGTRLSILEDLRNVTPPKVSLFEPSKAEIAN | |
| | KQKATLVCLARGFFPDHVELSWWVNGKEVHSGVCTDPQAYKESNYSYCLSSR | |
| | LRVSATFWHNPRNHFRCQVQFHGLSEEDKWPEGSPKPVTQNISAEAWGRADC | |
| | GITSASYQQGVLSATILYEILLGKATLYAVLVSTLVVMAMVKRKNS | |

[0179] In some embodiments, TCR015 interacts with and/or is specific for p53. In some embodiments, the peptide is from a neoantigen of p53. In some embodiments, the neoantigen has the amino acid change Y220C relative to the wild type p53 sequence. In some embodiments, TCR015 interacts with the neoantigen in the context of HLA-DRB1*04:01:01, as described in International Publication No. WO 2019/067243, incorporated herein by reference in its entirety.

TABLE 6P
Amino acid sequences of TCR016.

| | | SEQ |
|---|---|---|
| | | ID |
| Description | Sequence | NO: |
| CDR1α | VSGNPY | 1151 |
| CDR2α | YITGDNLV | 1152 |
| CDR3α | AVRVWDYKLS | 1153 |
| Vα w/o signal peptide | QSVAQPEDQVNVAEGNPLTVKCTYSVSGNPYLFWYVQYPNRGLQFLLKYITG | 1154 |
| (SignalP) | DNLVKGSYGFEAEFNKSQTSFHLKKPSALVSDSALYFCAVRVWDYKLSFGAG | |
| | TTVTVRA | |
| Vα w/o signal peptide | AQSVAQPEDQVNVAEGNPLTVKCTYSVSGNPYLFWYVQYPNRGLQFLLKYIT | 1155 |
| (IMGT) | GDNLVKGSYGFEAEFNKSQTSFHLKKPSALVSDSALYFCAVRVWDYKLSFGA | |
| | GTTVTVRA | |
| Vα | MXSAPISMLAMLFTLSGLRAQSVAQPEDQVNVAEGNPLTVKCTYSVSGNPYL | 1156 |
| | FWYVQYPNRGLQFLLKYITGDNLVKGSYGFEAEFNKSQTSFHLKKPSALVSD | 1157 |
| | SALYFCAVRVWDYKLSFGAGTTVTVRA | |
| | (X = any amino acid) | |
| α chain w/WT signal | MASAPISMLAMLFTLSGLRAQSVAQPEDQVNVAEGNPLTVKCTYSVSGNPYL | 1158 |
| peptide, Cα | FWYVQYPNRGLQFLLKYITGDNLVKGSYGFEAEFNKSQTSFHLKKPSALVSD | 1159 |
| (substituted) | SALYFCAVRVWDYKLSFGAGTTVTVRANIQNPEPAVYQLKDPRSQDSTLCLF | |
| | TDFDSQINVPKTMESGTFITDKCVLDMKAMDSKSNGAIAWSNQTSFTCQDIF | |
| | KETNATYPSSDVPCDATLTEKSFETDMNLNFQNLLVIVLRILLLKVAGFNLL | |
| | MTLRLWSS | |
| α chain w/alternative | MHSAPISMLAMLFTLSGLRAQSVAQPEDQVNVAEGNPLTVKCTYSVSGNPYL | 1160 |
| signal peptide, Cα | FWYVQYPNRGLQFLLKYITGDNLVKGSYGFEAEFNKSQTSFHLKKPSALVSD | |
| (substituted) | SALYFCAVRVWDYKLSFGAGTTVTVRANIQNPEPAVYQLKDPRSQDSTLCLF | |
| | TDFDSQINVPKTMESGTFITDKCVLDMKAMDSKSNGAIAWSNQTSFTCQDIF | |
| | KETNATYPSSDVPCDATLTEKSFETDMNLNFQNLLVIVLRILLLKVAGFNLL | |
| | MTLRLWSS | |
| CDR1β | LNHDA | 2151 |
| CDR2β | SQIVND | 2152 |
| CDR3β | ASSISAGGDGYT | 2153 |
| Vβ w/o signal peptide | GITQSPKYLFRKEGQNVTLSCEQNLNHDAMYWYRQDPGQGLRLIYYSQIVND | 2154 |
| (SignalP) | FQKGDIAEGYSVSREKKESFPLTVTSAQKNPTAFYLCASSISAGGDGYTFGS | |
| | GTRLTVV | |
| Vβ w/o signal peptide | DGGITQSPKYLFRKEGQNVTLSCEQNLNHDAMYWYRQDPGQGLRLIYYSQIV | 2155 |
| (IMGT) | NDFQKGDIAEGYSVSREKKESFPLTVTSAQKNPTAFYLCASSISAGGDGYTF | |
| | GSGTRLTVV | |
| Vβ | MXNQVLCCVVLCFLGANTVDGGITQSPKYLFRKEGQNVTLSCEQNLNHDAMY | 2156 |
| | WYRQDPGQGLRLIYYSQIVNDFQKGDIAEGYSVSREKKESFPLTVTSAQKNP | 2157 |
| | TAFYLCASSISAGGDGYTFGSGTRLTVV | |
| | (X = any amino acid) | |
| β chain w/WT signal | MSNQVLCCVVLCFLGANTVDGGITQSPKYLFRKEGQNVTLSCEQNLNHDAMY | 2158 |
| peptide, Cβ | WYRQDPGQGLRLIYYSQIVNDFQKGDIAEGYSVSREKKESFPLTVTSAQKNP | |
| (substituted) | TAFYLCASSISAGGDGYTFGSGTRLTVVEDLRNVTPPKVSLFEPSKAEIANK | |
| | QKATLVCLARGFFPDHVELSWWVNGKEVHSGVCTDPQAYKESNYSYCLSSRL | |
| | RVSATFWHNPRNHFRCQVQFHGLSEEDKWPEGSPKPVTQNISAEAWGRADCG | |
| | ITSASYQQGVLSATILYEILLGKATLYAVLVSTLVVMAMVKRKNS | |
| β chain w/alternative | MANQVLCCVVLCFLGANTVDGGITQSPKYLFRKEGQNVTLSCEQNLNHDAMY | 2159 |
| signal peptide, Cβ | WYRQDPGQGLRLIYYSQIVNDFQKGDIAEGYSVSREKKESFPLTVTSAQKNP | |
| (substituted) | TAFYLCASSISAGGDGYTFGSGTRLTVVEDLRNVTPPKVSLFEPSKAEIANK | |
| | QKATLVCLARGFFPDHVELSWWVNGKEVHSGVCTDPQAYKESNYSYCLSSRL | |
| | RVSATFWHNPRNHFRCQVQFHGLSEEDKWPEGSPKPVTQNISAEAWGRADCG | |
| | ITSASYQQGVLSATILYEILLGKATLYAVLVSTLVVMAMVKRKNS | |
| β chain w/alternative | MHNQVLCCVVLCFLGANTVDGGITQSPKYLFRKEGQNVTLSCEQNLNHDAMY | 2160 |
| signal peptide, Cβ | WYRQDPGQGLRLIYYSQIVNDFQKGDIAEGYSVSREKKESFPLTVTSAQKNP | |
| (substituted) | TAFYLCASSISAGGDGYTFGSGTRLTVVEDLRNVTPPKVSLFEPSKAEIANK | |
| | QKATLVCLARGFFPDHVELSWWVNGKEVHSGVCTDPQAYKESNYSYCLSSRL | |
| | RVSATFWHNPRNHFRCQVQFHGLSEEDKWPEGSPKPVTQNISAEAWGRADCG | |
| | ITSASYQQGVLSATILYEILLGKATLYAVLVSTLVVMAMVKRKNS | |

[0180] In some embodiments, TCR016 interacts with and/or is specific for p53. In some embodiments, the peptide is from a neoantigen of p53. In some embodiments, the neoantigen has the amino acid change Y220C relative to the wild type p53 sequence. In some embodiments, TCR016 interacts with the neoantigen in the context of HLA-DRB3*02:02, as described in International Publication No. WO 2019/067243, incorporated herein by reference in its entirety.

TABLE 6Q
Amino acid sequences of TCR017.

| | | SEQ |
|---|---|---|
| | | ID |
| Description | Sequence | NO: |
| CDR1α | TSGFNG | 1161 |
| CDR2α | NVLDGL | 1162 |
| CDR3α | AVKWTGGFKTI | 1163 |
| Vα w/o signal peptide | QNIDQPTEMTATEGAIVQINCTYQTSGFNGLFWYQQHAGEAPTFLSYNVLDG | 1164 |
| (SignalP) | LEEKGRFSSFLSRSKGYSYLLLKELQMKDSASYLCAVKWTGGFKTIFGAGTR | |
| | LFVKA | |
| Vα w/o signal peptide | GQNIDQPTEMTATEGAIVQINCTYQTSGFNGLFWYQQHAGEAPTFLSYNVLD | 1165 |
| (IMGT) | GLEEKGRFSSFLSRSKGYSYLLLKELQMKDSASYLCAVKWTGGFKTIFGAGT | |
| | RLFVKA | |
| Vα | MXGVFLLYVSMKMGGTTGQNIDQPTEMTATEGAIVQINCTYQTSGFNGLFWY | 1166 |
| | QQHAGEAPTFLSYNVLDGLEEKGRESSFLSRSKGYSYLLLKELQMKDSASYL | 1167 |
| | CAVKWTGGFKTIFGAGTRLFVKA | |
| | (X = any amino acid) | |
| α chain w/WT signal | MWGVFLLYVSMKMGGTTGQNIDQPTEMTATEGAIVQINCTYQTSGFNGLFWY | 1168 |
| peptide, Cα | QQHAGEAPTFLSYNVLDGLEEKGRESSFLSRSKGYSYLLLKELQMKDSASYL | |
| (substituted) | CAVKWTGGFKTIFGAGTRLFVKANIQNPEPAVYQLKDPRSQDSTLCLFTDFD | |
| | SQINVPKTMESGTFITDKCVLDMKAMDSKSNGAIAWSNQTSFTCQDIFKETN | |
| | ATYPSSDVPCDATLTEKSFETDMNLNFQNLLVIVLRILLLKVAGFNLLMTLR | |
| | LWSS | |
| α chain w/alternative | MAGVFLLYVSMKMGGTTGQNIDQPTEMTATEGAIVQINCTYQTSGFNGLFWY | 1169 |
| signal peptide, Cα | QQHAGEAPTFLSYNVLDGLEEKGRESSFLSRSKGYSYLLLKELQMKDSASYL | |
| (substituted) | CAVKWTGGFKTIFGAGTRLFVKANIQNPEPAVYQLKDPRSQDSTLCLFTDFD | |
| | SQINVPKTMESGTFITDKCVLDMKAMDSKSNGAIAWSNQTSFTCQDIFKETN | |
| | ATYPSSDVPCDATLTEKSFETDMNLNFQNLLVIVLRILLLKVAGFNLLMTLR | |
| | LWSS | |
| α chain w/alternative | MHGVFLLYVSMKMGGTTGQNIDQPTEMTATEGAIVQINCTYQTSGFNGLFWY | 1170 |
| signal peptide, Cα | QQHAGEAPTFLSYNVLDGLEEKGRESSFLSRSKGYSYLLLKELQMKDSASYL | |
| (substituted) | CAVKWTGGFKTIFGAGTRLFVKANIQNPEPAVYQLKDPRSQDSTLCLFTDFD | |
| | SQINVPKTMESGTFITDKCVLDMKAMDSKSNGAIAWSNQTSFTCQDIFKETN | |
| | ATYPSSDVPCDATLTEKSFETDMNLNFQNLLVIVLRILLLKVAGFNLLMTLR | |
| | LWSS | |
| CDR1β | MNHEY | 2161 |
| CDR2β | SVGAGI | 2162 |
| CDR3β | ASSYRESHYGYT | 2163 |
| Vβ w/o signal peptide | GVTQTPKFQVLKTGQSMTLQCAQDMNHEYMSWYRQDPGMGLRLIHYSVGAGI | 2164 |
| (SignalP) | TDQGEVPNGYNVSRSTTEDFPLRLLSAAPSQTSVYFCASSYRESHYGYTFGS | |
| | GTRLTVV | |
| Vβ w/o signal peptide | NAGVTQTPKFQVLKTGQSMTLQCAQDMNHEYMSWYRQDPGMGLRLIHYSVGA | 2165 |
| (IMGT) | GITDQGEVPNGYNVSRSTTEDFPLRLLSAAPSQTSVYFCASSYRESHYGYTF | |
| | GSGTRLTVV | |
| Vβ | MXIGLLCCAALSLLWAGPVNAGVTQTPKFQVLKTGQSMTLQCAQDMNHEYMS | 2166 |
| | WYRQDPGMGLRLIHYSVGAGITDQGEVPNGYNVSRSTTEDFPLRLLSAAPSQ | 2167 |
| | TSVYFCASSYRESHYGYTFGSGTRLTVV | |
| | (X = any amino acid) | |
| β chain w/WT signal | MSIGLLCCAALSLLWAGPVNAGVTQTPKFQVLKTGQSMTLQCAQDMNHEYMS | 2168 |
| peptide, Cβ | WYRQDPGMGLRLIHYSVGAGITDQGEVPNGYNVSRSTTEDFPLRLLSAAPSQ | |
| (substituted) | TSVYFCASSYRESHYGYTFGSGTRLTVVEDLRNVTPPKVSLFEPSKAEIANK | |
| | QKATLVCLARGFFPDHVELSWWVNGKEVHSGVCTDPQAYKESNYSYCLSSRL | |
| | RVSATFWHNPRNHFRCQVQFHGLSEEDKWPEGSPKPVTQNISAEAWGRADCG | |
| | ITSASYQQGVLSATILYEILLGKATLYAVLVSTLVVMAMVKRKNS | |
| β chain w/alternative | MAIGLLCCAALSLLWAGPVNAGVTQTPKFQVLKTGQSMTLQCAQDMNHEYMS | 2169 |
| signal peptide, Cβ | WYRQDPGMGLRLIHYSVGAGITDQGEVPNGYNVSRSTTEDFPLRLLSAAPSQ | |
| (substituted) | TSVYFCASSYRESHYGYTFGSGTRLTVVEDLRNVTPPKVSLFEPSKAEIANK | |
| | QKATLVCLARGFFPDHVELSWWVNGKEVHSGVCTDPQAYKESNYSYCLSSRL | |
| | RVSATFWHNPRNHFRCQVQFHGLSEEDKWPEGSPKPVTQNISAEAWGRADCG | |
| | ITSASYQQGVLSATILYEILLGKATLYAVLVSTLVVMAMVKRKNS | |
| β chain w/alternative | MHIGLLCCAALSLLWAGPVNAGVTQTPKFQVLKTGQSMTLQCAQDMNHEYMS | 2170 |
| signal peptide, Cβ | WYRQDPGMGLRLIHYSVGAGITDQGEVPNGYNVSRSTTEDFPLRLLSAAPSQ | |
| (substituted) | TSVYFCASSYRESHYGYTFGSGTRLTVVEDLRNVTPPKVSLFEPSKAEIANK | |
| | QKATLVCLARGFFPDHVELSWWVNGKEVHSGVCTDPQAYKESNYSYCLSSRL | |
| | RVSATFWHNPRNHFRCQVQFHGLSEEDKWPEGSPKPVTQNISAEAWGRADCG | |
| | ITSASYQQGVLSATILYEILLGKATLYAVLVSTLVVMAMVKRKNS | |

[0181] In some embodiments, TCR017 interacts with and/or is specific for p53. In some embodiments, the peptide is from a neoantigen of p53. In some embodiments, the neoantigen has the amino acid change G245S relative to the wild type p53 sequence. In some embodiments, TCR017 interacts with the neoantigen in the context of HLA-DRB3*02:02, as described in International Publication No. WO 2019/067243, incorporated herein by reference in its entirety.

TABLE 6R
Amino acid sequences of TCR018.

| | | SEQ |
|---|---|---|
| | | ID |
| Description | Sequence | NO: |
| CDR1α | YGGTVN | 1171 |
| CDR2α | YFSGDPLV | 1172 |
| CDR3α | AVKGDYKLS | 1173 |
| Vα w/o signal peptide | QSVSQHNHHVILSEAASLELGCNYSYGGTVNLFWYVQYPGQHLQLLLKYFSG | 1174 |
| (SignalP) | DPLVKGIKGFEAEFIKSKFSFNLRKPSVQWSDTAEYFCAVKGDYKLSFGAGT | |
| | TVTVRA | |
| Vα w/o signal peptide | AQSVSQHNHHVILSEAASLELGCNYSYGGTVNLFWYVQYPGQHLQLLLKYFS | 1175 |
| (IMGT) | GDPLVKGIKGFEAEFIKSKFSFNLRKPSVQWSDTAEYFCAVKGDYKLSFGAG | |
| | TTVTVRA | |
| Vα | MXLLLIPVLGMIFALRDARAQSVSQHNHHVILSEAASLELGCNYSYGGTVNL | 1176 |
| | FWYVQYPGQHLQLLLKYFSGDPLVKGIKGFEAEFIKSKFSFNLRKPSVQWSD | 1177 |
| | TAEYFCAVKGDYKLSFGAGTTVTVRA | |
| | (X = any amino acid) | |
| α chain w/WT signal | MLLLLIPVLGMIFALRDARAQSVSQHNHHVILSEAASLELGCNYSYGGTVNL | 1178 |
| peptide, Cα | FWYVQYPGQHLQLLLKYFSGDPLVKGIKGFEAEFIKSKFSFNLRKPSVQWSD | |
| (substituted) | TAEYFCAVKGDYKLSFGAGTTVTVRANIQNPEPAVYQLKDPRSQDSTLCLFT | |
| | DFDSQINVPKTMESGTFITDKCVLDMKAMDSKSNGAIAWSNQTSFTCQDIFK | |
| | ETNATYPSSDVPCDATLTEKSFETDMNLNFQNLLVIVLRILLLKVAGFNLLM | |
| | TLRLWSS | |
| α chain w/alternative | MALLLIPVLGMIFALRDARAQSVSQHNHHVILSEAASLELGCNYSYGGTVNL | 1179 |
| signal peptide, Cα | FWYVQYPGQHLQLLLKYFSGDPLVKGIKGFEAEFIKSKFSFNLRKPSVQWSD | |
| (substituted) | TAEYFCAVKGDYKLSFGAGTTVTVRANIQNPEPAVYQLKDPRSQDSTLCLFT | |
| | DFDSQINVPKTMESGTFITDKCVLDMKAMDSKSNGAIAWSNQTSFTCQDIFK | |
| | ETNATYPSSDVPCDATLTEKSFETDMNLNFQNLLVIVLRILLLKVAGFNLLM | |
| | TLRLWSS | |
| α chain w/alternative | MHLLLIPVLGMIFALRDARAQSVSQHNHHVILSEAASLELGCNYSYGGTVNL | 1180 |
| signal peptide, Cα | FWYVQYPGQHLQLLLKYFSGDPLVKGIKGFEAEFIKSKFSFNLRKPSVQWSD | |
| (substituted) | TAEYFCAVKGDYKLSFGAGTTVTVRANIQNPEPAVYQLKDPRSQDSTLCLFT | |
| | DFDSQINVPKTMESGTFITDKCVLDMKAMDSKSNGAIAWSNQTSFTCQDIFK | |
| | ETNATYPSSDVPCDATLTEKSFETDMNLNFQNLLVIVLRILLLKVAGFNLLM | |
| | TLRLWSS | |
| CDR1β | SGHAT | 2171 |
| CDR2β | FQNNGV | 2172 |
| CDR3β | ASSLVNTEAF | 2173 |
| Vβ w/o signal peptide | GVAQSPRYKIIEKRQSVAFWCNPISGHATLYWYQQILGQGPKLLIQFQNNGV | 2174 |
| (SignalP) | VDDSQLPKDRFSAERLKGVDSTLKIQPAKLEDSAVYLCASSLVNTEAFFGQG | |
| | TRLTVV | |
| Vβ w/o signal peptide | EAGVAQSPRYKIIEKRQSVAFWCNPISGHATLYWYQQILGQGPKLLIQFQNN | 2175 |
| (IMGT) | GVVDDSQLPKDRFSAERLKGVDSTLKIQPAKLEDSAVYLCASSLVNTEAFFG | |
| | QGTRLTVV | |
| Vβ | MXTRLLCWAALCLLGAELTEAGVAQSPRYKIIEKRQSVAFWCNPISGHATLY | 2176 |
| | WYQQILGQGPKLLIQFQNNGVVDDSQLPKDRFSAERLKGVDSTLKIQPAKLE | 2177 |
| | DSAVYLCASSLVNTEAFFGQGTRLTVV | |
| | (X = any amino acid) | |
| β chain w/WT signal | MGTRLLCWAALCLLGAELTEAGVAQSPRYKIIEKRQSVAFWCNPISGHATLY | 2178 |
| peptide, Cβ | WYQQILGQGPKLLIQFQNNGVVDDSQLPKDRFSAERLKGVDSTLKIQPAKLE | |
| (substituted) | DSAVYLCASSLVNTEAFFGQGTRLTVVEDLRNVTPPKVSLFEPSKAEIANKQ | |
| | KATLVCLARGFFPDHVELSWWVNGKEVHSGVCTDPQAYKESNYSYCLSSRLR | |
| | VSATFWHNPRNHFRCQVQFHGLSEEDKWPEGSPKPVTQNISAEAWGRADCGI | |
| | TSASYQQGVLSATILYEILLGKATLYAVLVSTLVVMAMVKRKNS | |
| β chain w/alternative | MATRLLCWAALCLLGAELTEAGVAQSPRYKIIEKRQSVAFWCNPISGHATLY | 2179 |
| signal peptide, Cβ | WYQQILGQGPKLLIQFQNNGVVDDSQLPKDRFSAERLKGVDSTLKIQPAKLE | |
| (substituted) | DSAVYLCASSLVNTEAFFGQGTRLTVVEDLRNVTPPKVSLFEPSKAEIANKQ | |
| | KATLVCLARGFFPDHVELSWWVNGKEVHSGVCTDPQAYKESNYSYCLSSRLR | |
| | VSATFWHNPRNHFRCQVQFHGLSEEDKWPEGSPKPVTQNISAEAWGRADCGI | |
| | TSASYQQGVLSATILYEILLGKATLYAVLVSTLVVMAMVKRKNS | |
| β chain w/alternative | MHTRLLCWAALCLLGAELTEAGVAQSPRYKIIEKRQSVAFWCNPISGHATLY | 2180 |
| signal peptide, Cβ | WYQQILGQGPKLLIQFQNNGVVDDSQLPKDRFSAERLKGVDSTLKIQPAKLE | |
| (substituted) | DSAVYLCASSLVNTEAFFGQGTRLTVVEDLRNVTPPKVSLFEPSKAEIANKQ | |
| | KATLVCLARGFFPDHVELSWWVNGKEVHSGVCTDPQAYKESNYSYCLSSRLR | |
| | VSATFWHNPRNHFRCQVQFHGLSEEDKWPEGSPKPVTQNISAEAWGRADCGI | |
| | TSASYQQGVLSATILYEILLGKATLYAVLVSTLVVMAMVKRKNS | |

[0182] In some embodiments, TCR018 interacts with and/or is specific for p53. In some embodiments, the peptide is from a neoantigen of p53. In some embodiments, the neoantigen has the amino acid change G245S relative to the wild type p53 sequence. In some embodiments, TCR018 interacts with the neoantigen in the context of HLA-DRB3*02:02, as described in International Publication No. WO 2019/067243, incorporated herein by reference in its entirety.

TABLE 6S
Amino acid sequences of TCR019.

| | | SEQ |
|---|---|---|
| | | ID |
| Description | Sequence | NO: |
| CDR1α | TRDTTYY | 1181 |
| CDR2α | RNSFDEQN | 1182 |
| CDR3α | ALSEGGSNYKLT | 1183 |
| Vα w/o signal peptide | QKVTQAQTEISVVEKEDVTLDCVYETRDTTYYLFWYKQPPSGELVFLIRRNS | 1184 |
| (SignalP) | FDEQNEISGRYSWNFQKSTSSFNFTITASQVVDSAVYFCALSEGGSNYKLTF | |
| | GKGTLLTVNP | |
| Vα w/o signal peptide | AQKVTQAQTEISVVEKEDVTLDCVYETRDTTYYLFWYKQPPSGELVFLIRRN | 1185 |
| (IMGT) | SFDEQNEISGRYSWNFQKSTSSENFTITASQVVDSAVYFCALSEGGSNYKLT | |
| | FGKGTLLTVNP | |
| Vα | MXTASLLRAVIASICVVSSMAQKVTQAQTEISVVEKEDVTLDCVYETRDTTY | 1186 |
| | YLFWYKQPPSGELVFLIRRNSFDEQNEISGRYSWNFQKSTSSFNFTITASQV | 1187 |
| | VDSAVYFCALSEGGSNYKLTFGKGTLLTVNP | |
| | (X = any amino acid) | |
| α chain w/WT signal | MLTASLLRAVIASICVVSSMAQKVTQAQTEISVVEKEDVTLDCVYETRDTTY | 1188 |
| peptide, Cα | YLFWYKQPPSGELVFLIRRNSFDEQNEISGRYSWNFQKSTSSFNFTITASQV | |
| (substituted) | VDSAVYFCALSEGGSNYKLTFGKGTLLTVNPNIQNPEPAVYQLKDPRSQDST | |
| | LCLFTDFDSQINVPKTMESGTFITDKCVLDMKAMDSKSNGAIAWSNQTSFTC | |
| | QDIFKETNATYPSSDVPCDATLTEKSFETDMNLNFQNLLVIVLRILLLKVAG | |
| | FNLLMTLRLWSS | |
| α chain w/alternative | MATASLLRAVIASICVVSSMAQKVTQAQTEISVVEKEDVTLDCVYETRDTTY | 1189 |
| signal peptide, Cα | YLFWYKQPPSGELVFLIRRNSFDEQNEISGRYSWNFQKSTSSFNFTITASQV | |
| (substituted) | VDSAVYFCALSEGGSNYKLTFGKGTLLTVNPNIQNPEPAVYQLKDPRSQDST | |
| | LCLFTDFDSQINVPKTMESGTFITDKCVLDMKAMDSKSNGAIAWSNQTSFTC | |
| | QDIFKETNATYPSSDVPCDATLTEKSFETDMNLNFQNLLVIVLRILLLKVAG | |
| | FNLLMTLRLWSS | |
| α chain w/alternative | MHTASLLRAVIASICVVSSMAQKVTQAQTEISVVEKEDVTLDCVYETRDTTY | 1190 |
| signal peptide, Cα | YLFWYKQPPSGELVFLIRRNSFDEQNEISGRYSWNFQKSTSSFNFTITASQV | |
| (substituted) | VDSAVYFCALSEGGSNYKLTFGKGTLLTVNPNIQNPEPAVYQLKDPRSQDST | |
| | LCLFTDFDSQINVPKTMESGTFITDKCVLDMKAMDSKSNGAIAWSNQTSFTC | |
| | QDIFKETNATYPSSDVPCDATLTEKSFETDMNLNFQNLLVIVLRILLLKVAG | |
| | FNLLMTLRLWSS | |
| CDR1β | LNHNV | 2181 |
| CDR2β | YYDKDF | 2182 |
| CDR3β | ATSRELRGNEQF | 2183 |
| Vβ w/o signal peptide | DAMVIQNPRYQVTQFGKPVTLSCSQTLNHNVMYWYQQKSSQAPKLLFHYYDK | 2184 |
| (SignalP) | DFNNEADTPDNFQSRRPNTSFCFLDIRSPGLGDAAMYLCATSRELRGNEQFF | |
| | GPGTRLTVL | |
| Vβ w/o signal peptide | DAMVIQNPRYQVTQFGKPVTLSCSQTLNHNVMYWYQQKSSQAPKLLFHYYDK | 2185 |
| (IMGT) | DFNNEADTPDNFQSRRPNTSFCFLDIRSPGLGDAAMYLCATSRELRGNEQFF | |
| | GPGTRLTVL | |
| Vβ | MXPGLLHWMALCLLGTGHGDAMVIQNPRYQVTQFGKPVTLSCSQTLNHNVMY | 2186 |
| | WYQQKSSQAPKLLFHYYDKDFNNEADTPDNFQSRRPNTSFCFLDIRSPGLGD | 2187 |
| | AAMYLCATSRELRGNEQFFGPGTRLTVL | |
| | (X = any amino acid) | |
| β chain w/WT signal | MGPGLLHWMALCLLGTGHGDAMVIQNPRYQVTQFGKPVTLSCSQTLNHNVMY | 2188 |
| peptide, Cβ | WYQQKSSQAPKLLFHYYDKDFNNEADTPDNFQSRRPNTSFCFLDIRSPGLGD | |
| (substituted) | AAMYLCATSRELRGNEQFFGPGTRLTVLEDLRNVTPPKVSLFEPSKAEIANK | |
| | QKATLVCLARGFFPDHVELSWWVNGKEVHSGVCTDPQAYKESNYSYCLSSRL | |
| | RVSATFWHNPRNHFRCQVQFHGLSEEDKWPEGSPKPVTQNISAEAWGRADCG | |
| | ITSASYQQGVLSATILYEILLGKATLYAVLVSTLVVMAMVKRKNS | |
| β chain w/alternative | MAPGLLHWMALCLLGTGHGDAMVIQNPRYQVTQFGKPVTLSCSQTLNHNVMY | 2189 |
| signal peptide, Cβ | WYQQKSSQAPKLLFHYYDKDENNEADTPDNFQSRRPNTSFCFLDIRSPGLGD | |
| (substituted) | AAMYLCATSRELRGNEQFFGPGTRLTVLEDLRNVTPPKVSLFEPSKAEIANK | |
| | QKATLVCLARGFFPDHVELSWWVNGKEVHSGVCTDPQAYKESNYSYCLSSRL | |
| | RVSATFWHNPRNHFRCQVQFHGLSEEDKWPEGSPKPVTQNISAEAWGRADCG | |
| | ITSASYQQGVLSATILYEILLGKATLYAVLVSTLVVMAMVKRKNS | |
| β chain w/alternative | MHPGLLHWMALCLLGTGHGDAMVIQNPRYQVTQFGKPVTLSCSQTLNHNVMY | 2190 |
| signal peptide, Cβ | WYQQKSSQAPKLLFHYYDKDFNNEADTPDNFQSRRPNTSFCFLDIRSPGLGD | |
| (substituted) | AAMYLCATSRELRGNEQFFGPGTRLTVLEDLRNVTPPKVSLFEPSKAEIANK | |
| | QKATLVCLARGFFPDHVELSWWVNGKEVHSGVCTDPQAYKESNYSYCLSSRL | |
| | RVSATFWHNPRNHFRCQVQFHGLSEEDKWPEGSPKPVTQNISAEAWGRADCG | |
| | ITSASYQQGVLSATILYEILLGKATLYAVLVSTLVVMAMVKRKNS | |

[0183] In some embodiments, TCR019 interacts with and/or is specific for p53. In some embodiments, the peptide is from a neoantigen of p53. In some embodiments, the neoantigen has the amino acid change G245S relative to the wild type p53 sequence. In some embodiments, TCR019 interacts with the neoantigen in the context of HLA-DRB3*02:02, as described in International Publication No. WO 2019/067243, incorporated herein b reference in its entirety.

TABLE 6T
Amino acid sequences of TCR020.

| | | SEQ |
|---|---|---|
| | | ID |
| Description | Sequence | NO: |
| CDR1α | DRGSQS | 1191 |
| CDR2α | IYSNGD | 1192 |
| CDR3α | AVNDAGNMLT | 1193 |
| Vα without signal | QQKEVEQNSGPLSVPEGAIASLNCTYSDRGSQSFFWYRQYSGKSPELIMFIY | 1194 |
| peptide (SignalP) | SNGDKEDGRFTAQLNKASQYVSLLIRDSQPSDSATYLCAVNDAGNMLTFGGG | |
| | TRLMVKP | |
| Vα without signal | QKEVEQNSGPLSVPEGAIASLNCTYSDRGSQSFFWYRQYSGKSPELIMFIYS | 1195 |
| peptide (IMGT) | NGDKEDGRFTAQLNKASQYVSLLIRDSQPSDSATYLCAVNDAGNMLTFGGGT | |
| | RLMVKP | |
| Vα | MXSLRVLLVILWLQLSWVWSQQKEVEQNSGPLSVPEGAIASLNCTYSDRGSQ | 1196 |
| | SFFWYRQYSGKSPELIMFIYSNGDKEDGRFTAQLNKASQYVSLLIRDSQPSD | 1197 |
| | SATYLCAVNDAGNMLTFGGGTRLMVKP | |
| | (X = any amino acid) | |
| α chain with WT signal | MKSLRVLLVILWLQLSWVWSQQKEVEQNSGPLSVPEGAIASLNCTYSDRGSQ | 1198 |
| peptide, Cα | SFFWYRQYSGKSPELIMFIYSNGDKEDGRFTAQLNKASQYVSLLIRDSQPSD | |
| (substituted) | SATYLCAVNDAGNMLTFGGGTRLMVKPNIQNPEPAVYQLKDPRSQDSTLCLF | |
| | TDFDSQINVPKTMESGTFITDKCVLDMKAMDSKSNGAIAWSNQTSFTCQDIF | |
| | KETNATYPSSDVPCDATLTEKSFETDMNLNFQNLLVIVLRILLLKVAGFNLL | |
| | MTLRLWSS | |
| α chain with | MASLRVLLVILWLQLSWVWSQQKEVEQNSGPLSVPEGAIASLNCTYSDRGSQ | 1199 |
| alternative signal | SFFWYRQYSGKSPELIMFIYSNGDKEDGRFTAQLNKASQYVSLLIRDSQPSD | |
| peptide, Cα | SATYLCAVNDAGNMLTFGGGTRLMVKPNIQNPEPAVYQLKDPRSQDSTLCLF | |
| (substituted) | TDFDSQINVPKTMESGTFITDKCVLDMKAMDSKSNGAIAWSNQTSFTCQDIF | |
| | KETNATYPSSDVPCDATLTEKSFETDMNLNFQNLLVIVLRILLLKVAGFNLL | |
| | MTLRLWSS | |
| α chain with | MHSLRVLLVILWLQLSWVWSQQKEVEQNSGPLSVPEGAIASLNCTYSDRGSQ | 1200 |
| alternative signal | SFFWYRQYSGKSPELIMFIYSNGDKEDGRFTAQLNKASQYVSLLIRDSQPSD | |
| peptide, Cα | SATYLCAVNDAGNMLTFGGGTRLMVKPNIQNPEPAVYQLKDPRSQDSTLCLF | |
| (substituted) | TDFDSQINVPKTMESGTFITDKCVLDMKAMDSKSNGAIAWSNQTSFTCQDIF | |
| | KETNATYPSSDVPCDATLTEKSFETDMNLNFQNLLVIVLRILLLKVAGFNLL | |
| | MTLRLWSS | |
| CDR1β | DFQATT | 2191 |
| CDR2β | SNEGSKA | 2192 |
| CDR3β | SAAGQANTEAF | 2193 |
| Vβ without signal | GSGLGAVVSQHPSWVICKSGTSVKIECRSLDFQATTMFWYRQFPKQSLMLMA | 2194 |
| peptide (SignalP) | TSNEGSKATYEQGVEKDKFLINHASLTLSTLTVTSAHPEDSSFYICSAAGQA | |
| | NTEAFFGQGTRLTVV | |
| Vβ without signal | GAVVSQHPSWVICKSGTSVKIECRSLDFQATTMFWYRQFPKQSLMLMATSNE | 2195 |
| peptide (IMGT) | GSKATYEQGVEKDKFLINHASLTLSTLTVTSAHPEDSSFYICSAAGQANTEA | |
| | FFGQGTRLTVV | |
| Vβ | MXLLLLLLGPGISLLLPGSLAGSGLGAVVSQHPSWVICKSGTSVKIECRSLD | 2196 |
| | FQATTMFWYRQFPKQSLMLMATSNEGSKATYEQGVEKDKFLINHASLTLSTL | 2197 |
| | TVTSAHPEDSSFYICSAAGQANTEAFFGQGTRLTVV | |
| | (X = any amino acid) | |
| β chain with WT signal | MLLLLLLLGPGISLLLPGSLAGSGLGAVVSQHPSWVICKSGTSVKIECRSLD | 2198 |
| peptide, Cβ | FQATTMFWYRQFPKQSLMLMATSNEGSKATYEQGVEKDKFLINHASLTLSTL | |
| (substituted) | TVTSAHPEDSSFYICSAAGQANTEAFFGQGTRLTVVEDLRNVTPPKVSLFEP | |
| | SKAEIANKQKATLVCLARGFFPDHVELSWWVNGKEVHSGVCTDPQAYKESNY | |
| | SYCLSSRLRVSATFWHNPRNHFRCQVQFHGLSEEDKWPEGSPKPVTQNISAE | |
| | AWGRADCGITSASYQQGVLSATILYEILLGKATLYAVLVSTLVVMAMVKRKN | |
| | S | |
| β chain with alternative | MALLLLLLGPGISLLLPGSLAGSGLGAVVSQHPSWVICKSGTSVKIECRSLD | 2199 |
| signal peptide, Cβ | FQATTMFWYRQFPKQSLMLMATSNEGSKATYEQGVEKDKFLINHASLTLSTL | |
| (substituted) | TVTSAHPEDSSFYICSAAGQANTEAFFGQGTRLTVVEDLRNVTPPKVSLFEP | |
| | SKAEIANKQKATLVCLARGFFPDHVELSWWVNGKEVHSGVCTDPQAYKESNY | |
| | SYCLSSRLRVSATFWHNPRNHFRCQVQFHGLSEEDKWPEGSPKPVTQNISAE | |
| | AWGRADCGITSASYQQGVLSATILYEILLGKATLYAVLVSTLVVMAMVKRKN | |
| | S | |
| β chain with alternative | MHLLLLLLGPGISLLLPGSLAGSGLGAVVSQHPSWVICKSGTSVKIECRSLD | 2200 |
| signal peptide, Cβ | FQATTMFWYRQFPKQSLMLMATSNEGSKATYEQGVEKDKFLINHASLTLSTL | |
| (substituted) | TVTSAHPEDSSFYICSAAGQANTEAFFGQGTRLTVVEDLRNVTPPKVSLFEP | |
| | SKAEIANKQKATLVCLARGFFPDHVELSWWVNGKEVHSGVCTDPQAYKESNY | |
| | SYCLSSRLRVSATFWHNPRNHERCQVQFHGLSEEDKWPEGSPKPVTQNISAE | |
| | AWGRADCGITSASYQQGVLSATILYEILLGKATLYAVLVSTLVVMAMVKRKN | |
| | S | |

[0184] In some embodiments, TCR020 interacts with and/or is specific for p53. In some embodiments, the peptide is from a neoantigen of p53. In some embodiments, the neoantigen has the amino acid change G245S relative to the wild type p53 sequence. In some embodiments, TCR020 interacts with the neoantigen in the context of HLA-DRB3*02:02, as described in International Publication No. WO 2019/067243, incorporated herein by reference in its entirety.

TABLE 6U
Amino acid sequences of TCR021.

| | | SEQ |
|---|---|---|
| | | ID |
| Description | Sequence | NO: |
| CDR1α | TRDTTYY | 1201 |
| CDR2α | RNSFDEQN | 1202 |
| CDR3α | ALSEVDSGNTPLV | 1203 |
| Vα without signal | QKVTQAQTEISVVEKEDVTLDCVYETRDTTYYLFWYKQPPSGELVFLIRRNS | 1204 |
| peptide (SignalP) | FDEQNEISGRYSWNFQKSTSSFNFTITASQVVDSAVYFCALSEVDSGNTPLV | |
| | FGKGTRLSVIA | |
| Vα without signal | AQKVTQAQTEISVVEKEDVTLDCVYETRDTTYYLFWYKQPPSGELVFLIRRN | 1205 |
| peptide (IMGT) | SFDEQNEISGRYSWNFQKSTSSFNFTITASQVVDSAVYFCALSEVDSGNTPL | |
| | VFGKGTRLSVIA | |
| Vα | MXTASLLRAVIASICVVSSMAQKVTQAQTEISVVEKEDVTLDCVYETRDTTY | 1206 |
| | YLFWYKQPPSGELVFLIRRNSFDEQNEISGRYSWNFQKSTSSENFTITASQV | 1207 |
| | VDSAVYFCALSEVDSGNTPLVFGKGTRLSVIA | |
| | (X = any amino acid) | |
| α chain with WT signal | MLTASLLRAVIASICVVSSMAQKVTQAQTEISVVEKEDVTLDCVYETRDTTY | 1208 |
| peptide, Cα | YLFWYKQPPSGELVFLIRRNSFDEQNEISGRYSWNFQKSTSSFNFTITASQV | |
| (substituted) | VDSAVYFCALSEVDSGNTPLVFGKGTRLSVIANIQNPEPAVYQLKDPRSQDS | |
| | TLCLFTDFDSQINVPKTMESGTFITDKCVLDMKAMDSKSNGAIAWSNQTSFT | |
| | CQDIFKETNATYPSSDVPCDATLTEKSFETDMNLNFQNLLVIVLRILLLKVA | |
| | GFNLLMTLRLWSS | |
| α chain with | MATASLLRAVIASICVVSSMAQKVTQAQTEISVVEKEDVTLDCVYETRDTTY | 1209 |
| alternative signal | YLFWYKQPPSGELVFLIRRNSFDEQNEISGRYSWNFQKSTSSFNFTITASQV | |
| peptide, Cα | VDSAVYFCALSEVDSGNTPLVFGKGTRLSVIANIQNPEPAVYQLKDPRSQDS | |
| (substituted) | TLCLFTDFDSQINVPKTMESGTFITDKCVLDMKAMDSKSNGAIAWSNQTSFT | |
| | CQDIFKETNATYPSSDVPCDATLTEKSFETDMNLNFQNLLVIVLRILLLKVA | |
| | GFNLLMTLRLWSS | |
| α chain with | MHTASLLRAVIASICVVSSMAQKVTQAQTEISVVEKEDVTLDCVYETRDTTY | 1210 |
| alternative signal | YLFWYKQPPSGELVFLIRRNSFDEQNEISGRYSWNFQKSTSSFNFTITASQV | |
| peptide, Cα | VDSAVYFCALSEVDSGNTPLVFGKGTRLSVIANIQNPEPAVYQLKDPRSQDS | |
| (substituted) | TLCLFTDFDSQINVPKTMESGTFITDKCVLDMKAMDSKSNGAIAWSNQTSFT | |
| | CQDIFKETNATYPSSDVPCDATLTEKSFETDMNLNFQNLLVIVLRILLLKVA | |
| | GFNLLMTLRLWSS | |
| CDR1β | SGDLS | 2201 |
| CDR2β | YYNGEE | 2202 |
| CDR3β | ASSVGSSSSTDTQY | 2203 |
| Vβ without signal | GVTQTPKHLITATGQRVTLRCSPRSGDLSVYWYQQSLDQGLQFLIQYYNGEE | 2204 |
| peptide (SignalP) | RAKGNILERFSAQQFPDLHSELNLSSLELGDSALYFCASSVGSSSSTDTQYF | |
| | GPGTRLTVL | |
| Vβ without signal | DSGVTQTPKHLITATGQRVTLRCSPRSGDLSVYWYQQSLDQGLQFLIQYYNG | 2205 |
| peptide (IMGT) | EERAKGNILERFSAQQFPDLHSELNLSSLELGDSALYFCASSVGSSSSTDTQ | |
| | YFGPGTRLTVL | |
| Vβ | MXHFRLLCCVAFCLLGAGPVDSGVTQTPKHLITATGQRVTLRCSPRSGDLSV | 2206 |
| | YWYQQSLDQGLQFLIQYYNGEERAKGNILERFSAQQFPDLHSELNLSSLELG | 2207 |
| | DSALYFCASSVGSSSSTDTQYFGPGTRLTVL | |
| | (X = any amino acid) | |
| β chain with WT signal | MGFRLLCCVAFCLLGAGPVDSGVTQTPKHLITATGQRVTLRCSPRSGDLSVY | 2208 |
| peptide, Cβ | WYQQSLDQGLQFLIQYYNGEERAKGNILERFSAQQFPDLHSELNLSSLELGD | |
| (substituted) | SALYFCASSVGSSSSTDTQYFGPGTRLTVLEDLRNVTPPKVSLFEPSKAEIA | |
| | NKQKATLVCLARGFFPDHVELSWWVNGKEVHSGVCTDPQAYKESNYSYCLSS | |
| | RLRVSATFWHNPRNHFRCQVQFHGLSEEDKWPEGSPKPVTQNISAEAWGRAD | |
| | CGITSASYQQGVLSATILYEILLGKATLYAVLVSTLVVMAMVKRKNS | |
| β chain with alternative | MAFRLLCCVAFCLLGAGPVDSGVTQTPKHLITATGQRVTLRCSPRSGDLSVY | 2209 |
| signal peptide, Cβ | WYQQSLDQGLQFLIQYYNGEERAKGNILERFSAQQFPDLHSELNLSSLELGD | |
| (substituted) | SALYFCASSVGSSSSTDTQYFGPGTRLTVLEDLRNVTPPKVSLFEPSKAEIA | |
| | NKQKATLVCLARGFFPDHVELSWWVNGKEVHSGVCTDPQAYKESNYSYCLSS | |
| | RLRVSATFWHNPRNHFRCQVQFHGLSEEDKWPEGSPKPVTQNISAEAWGRAD | |
| | CGITSASYQQGVLSATILYEILLGKATLYAVLVSTLVVMAMVKRKNS | |
| β chain with alternative | MHFRLLCCVAFCLLGAGPVDSGVTQTPKHLITATGQRVTLRCSPRSGDLSVY | 2210 |
| signal peptide, Cβ | WYQQSLDQGLQFLIQYYNGEERAKGNILERFSAQQFPDLHSELNLSSLELGD | |
| (substituted) | SALYFCASSVGSSSSTDTQYFGPGTRLTVLEDLRNVTPPKVSLFEPSKAEIA | |
| | NKQKATLVCLARGFFPDHVELSWWVNGKEVHSGVCTDPQAYKESNYSYCLSS | |
| | RLRVSATFWHNPRNHFRCQVQFHGLSEEDKWPEGSPKPVTQNISAEAWGRAD | |
| | CGITSASYQQGVLSATILYEILLGKATLYAVLVSTLVVMAMVKRKNS | |

[0185] In some embodiments, TCR021 interacts with and/or is specific for p53. In some embodiments, the peptide is from a neoantigen of p53. In some embodiments, the neoantigen has the amino acid change R248Q relative to the wild type p53 sequence. In some embodiments, TCR021 interacts with the neoantigen in the context of HLA-A*02:01, as described in International Publication No. WO 2019/067243, incorporated herein by reference in its entirety.

TABLE 6V
Amino acid sequences of TCR022.

| | | SEQ |
|---|---|---|
| | | ID |
| Description | Sequence | NO: |
| CDR1α | NTAFDY | 1771 |
| CDR2α | IRPDVSE | 1772 |
| CDR3α | AAEAGNHRGSTLGRLY | 1773 |
| Vα w/o signal peptide | QQKEKSDQQQVKQSPQSLIVQKGGISIINCAYENTAFDYFPWYQQFPGKGPA | 1774 |
| (SignalP) | LLIAIRPDVSEKKEGRFTISENKSAKQFSLHIMDSQPGDSATYFCAAEAGNH | |
| | RGSTLGRLYFGRGTQLTVWP | |
| Vα w/o signal peptide | QQQVKQSPQSLIVQKGGISIINCAYENTAFDYFPWYQQFPGKGPALLIAIRP | 1775 |
| (IMGT) | DVSEKKEGRFTISFNKSAKQFSLHIMDSQPGDSATYFCAAEAGNHRGSTLGR | |
| | LYFGRGTQLTVWP | |
| Vα | MXKILGASFLVLWLQLCWVSGQQKEKSDQQQVKQSPQSLIVQKGGISIINCA | 1776 |
| | YENTAFDYFPWYQQFPGKGPALLIAIRPDVSEKKEGRFTISFNKSAKQFSLH | 1777 |
| | IMDSQPGDSATYFCAAEAGNHRGSTLGRLYFGRGTQLTVWP | |
| | (X = any amino acid) | |
| α chain with WT signal | MDKILGASFLVLWLQLCWVSGQQKEKSDQQQVKQSPQSLIVQKGGISIINCA | 1778 |
| peptide, Cα | YENTAFDYFPWYQQFPGKGPALLIAIRPDVSEKKEGRFTISFNKSAKQFSLH | |
| (substituted) | IMDSQPGDSATYFCAAEAGNHRGSTLGRLYFGRGTQLTVWPNIQNPEPAVYQ | |
| | LKDPRSQDSTLCLFTDFDSQINVPKTMESGTFITDKCVLDMKAMDSKSNGAI | |
| | AWSNQTSFTCQDIFKETNATYPSSDVPCDATLTEKSFETDMNLNFQNLLVIV | |
| | LRILLLKVAGFNLLMTLRLWSS | |
| α chain with | MAKILGASFLVLWLQLCWVSGQQKEKSDQQQVKQSPQSLIVQKGGISIINCA | 1779 |
| alternative signal | YENTAFDYFPWYQQFPGKGPALLIAIRPDVSEKKEGRFTISFNKSAKQFSLH | |
| peptide, Co | IMDSQPGDSATYFCAAEAGNHRGSTLGRLYFGRGTQLTVWPNIQNPEPAVYQ | |
| (substituted) | LKDPRSQDSTLCLFTDFDSQINVPKTMESGTFITDKCVLDMKAMDSKSNGAI | |
| | AWSNQTSFTCQDIFKETNATYPSSDVPCDATLTEKSFETDMNLNFQNLLVIV | |
| | LRILLLKVAGFNLLMTLRLWSS | |
| α chain with | MHKILGASFLVLWLQLCWVSGQQKEKSDQQQVKQSPQSLIVQKGGISIINCA | 1780 |
| alternative signal | YENTAFDYFPWYQQFPGKGPALLIAIRPDVSEKKEGRFTISFNKSAKQFSLH | |
| peptide, Cα | IMDSQPGDSATYFCAAEAGNHRGSTLGRLYFGRGTQLTVWPNIQNPEPAVYQ | |
| (substituted) | LKDPRSQDSTLCLFTDFDSQINVPKTMESGTFITDKCVLDMKAMDSKSNGAI | |
| | AWSNQTSFTCQDIFKETNATYPSSDVPCDATLTEKSFETDMNLNFQNLLVIV | |
| | LRILLLKVAGFNLLMTLRLWSS | |
| CDR1β | SGHRS | 2771 |
| CDR2β | YFSETQ | 2772 |
| CDR3β | ASSLAAGGYFNEQF | 2773 |
| Vβ w/o signal peptide | GVTQTPRYLIKTRGQQVTLSCSPISGHRSVSWYQQTPGQGLQFLFEYFSETQ | 2774 |
| (SignalP) | RNKGNFPGRFSGRQFSNSRSEMNVSTLELGDSALYLCASSLAAGGYFNEQFF | |
| | GPGTRLTVL | |
| Vβ w/o signal peptide | KAGVTQTPRYLIKTRGQQVTLSCSPISGHRSVSWYQQTPGQGLQFLFEYFSE | 2775 |
| (IMGT) | TQRNKGNFPGRFSGRQFSNSRSEMNVSTLELGDSALYLCASSLAAGGYFNEQ | |
| | FFGPGTRLTVL | |
| Vβ | MXSRLLCWVLLCLLGAGPVKAGVTQTPRYLIKTRGQQVTLSCSPISGHRSVS | 2776 |
| | WYQQTPGQGLQFLFEYFSETQRNKGNFPGRFSGRQFSNSRSEMNVSTLELGD | 2777 |
| | SALYLCASSLAAGGYFNEQFFGPGTRLTVL | |
| | (X = any amino acid) | |
| β chain with WT signal | MGSRLLCWVLLCLLGAGPVKAGVTQTPRYLIKTRGQQVTLSCSPISGHRSVS | 2778 |
| peptide, Cβ | WYQQTPGQGLQFLFEYFSETQRNKGNFPGRFSGRQFSNSRSEMNVSTLELGD | |
| (substituted) | SALYLCASSLAAGGYFNEQFFGPGTRLTVLEDLRNVTPPKVSLFEPSKAEIA | |
| | NKQKATLVCLARGFFPDHVELSWWVNGKEVHSGVCTDPQAYKESNYSYCLSS | |
| | RLRVSATFWHNPRNHFRCQVQFHGLSEEDKWPEGSPKPVTQNISAEAWGRAD | |
| | CGITSASYQQGVLSATILYEILLGKATLYAVLVSTLVVMAMVKRKNS | |
| β chain with alternative | MASRLLCWVLLCLLGAGPVKAGVTQTPRYLIKTRGQQVTLSCSPISGHRSVS | 2779 |
| signal peptide, Cβ | WYQQTPGQGLQFLFEYFSETQRNKGNFPGRFSGRQFSNSRSEMNVSTLELGD | |
| (substituted) | SALYLCASSLAAGGYFNEQFFGPGTRLTVLEDLRNVTPPKVSLFEPSKAEIA | |
| | NKQKATLVCLARGFFPDHVELSWWVNGKEVHSGVCTDPQAYKESNYSYCLSS | |
| | RLRVSATFWHNPRNHFRCQVQFHGLSEEDKWPEGSPKPVTQNISAEAWGRAD | |
| | CGITSASYQQGVLSATILYEILLGKATLYAVLVSTLVVMAMVKRKNS | |
| β chain with alternative | MHSRLLCWVLLCLLGAGPVKAGVTQTPRYLIKTRGQQVTLSCSPISGHRSVS | 2780 |
| signal peptide, Cβ | WYQQTPGQGLQFLFEYFSETQRNKGNFPGRFSGRQFSNSRSEMNVSTLELGD | |
| (substituted) | SALYLCASSLAAGGYFNEQFFGPGTRLTVLEDLRNVTPPKVSLFEPSKAEIA | |
| | NKQKATLVCLARGFFPDHVELSWWVNGKEVHSGVCTDPQAYKESNYSYCLSS | |
| | RLRVSATFWHNPRNHFRCQVQFHGLSEEDKWPEGSPKPVTQNISAEAWGRAD | |
| | CGITSASYQQGVLSATILYEILLGKATLYAVLVSTLVVMAMVKRKNS | |

[0186] In some embodiments, TCR022 interacts with and/or is specific for KRAS. In some embodiments, the peptide is from a neoantigen of KRAS. In some embodiments, the neoantigen has the amino acid change G12D relative to the wild type KRAS sequence. In some embodiments, TCR022 interacts with the neoantigen in the context of HLA-A*11:01, as described in International Publication No. WO 2021/163434, incorporated herein by reference in its entirety.

TABLE 6W
Amino acid sequences of TCR023.

| | | SEQ |
|---|---|---|
| | | ID |
| Description | Sequence | NO: |
| CDR1α | NSAFQY | 1221 |
| CDR2α | TYSSGN | 1222 |
| CDR3α | AMTSPYNNNDMR | 1223 |
| Vα without signal | QQKEVEQDPGPLSVPEGAIVSLNCTYSNSAFQYFMWYRQYSRKGPELLMYTY | 1224 |
| peptide (SignalP) | SSGNKEDGRFTAQVDKSSKYISLFIRDSQPSDSATYLCAMTSPYNNNDMRFG | |
| | AGTRLTVKP | |
| Vα without signal | QKEVEQDPGPLSVPEGAIVSLNCTYSNSAFQYFMWYRQYSRKGPELLMYTYS | 1225 |
| peptide (IMGT) | SGNKEDGRFTAQVDKSSKYISLFIRDSQPSDSATYLCAMTSPYNNNDMRFGA | |
| | GTRLTVKP | |
| Vα | MXKSLRVLLVILWLQLSWVWSQQKEVEQDPGPLSVPEGAIVSLNCTYSNSAF | 1226 |
| | QYFMWYRQYSRKGPELLMYTYSSGNKEDGRFTAQVDKSSKYISLFIRDSQPS | 1227 |
| | DSATYLCAMTSPYNNNDMRFGAGTRLTVKP | |
| | (X = any amino acid) | |
| α chain with WT signal | MCKSLRVLLVILWLQLSWVWSQQKEVEQDPGPLSVPEGAIVSLNCTYSNSAF | 1228 |
| peptide, Cα | QYFMWYRQYSRKGPELLMYTYSSGNKEDGRFTAQVDKSSKYISLFIRDSQPS | |
| (substituted) | DSATYLCAMTSPYNNNDMRFGAGTRLTVKPNIQNPEPAVYQLKDPRSQDSTL | |
| | CLFTDFDSQINVPKTMESGTFITDKCVLDMKAMDSKSNGAIAWSNQTSFTCQ | |
| | DIFKETNATYPSSDVPCDATLTEKSFETDMNLNFQNLLVIVLRILLLKVAGF | |
| | NLLMTLRLWSS | |
| α chain with | MAKSLRVLLVILWLQLSWVWSQQKEVEQDPGPLSVPEGAIVSLNCTYSNSAF | 1229 |
| alternative signal | QYFMWYRQYSRKGPELLMYTYSSGNKEDGRFTAQVDKSSKYISLFIRDSQPS | |
| peptide, Cα | DSATYLCAMTSPYNNNDMRFGAGTRLTVKPNIQNPEPAVYQLKDPRSQDSTL | |
| (substituted) | CLFTDFDSQINVPKTMESGTFITDKCVLDMKAMDSKSNGAIAWSNQTSFTCQ | |
| | DIFKETNATYPSSDVPCDATLTEKSFETDMNLNFQNLLVIVLRILLLKVAGF | |
| | NLLMTLRLWSS | |
| α chain with | MHKSLRVLLVILWLQLSWVWSQQKEVEQDPGPLSVPEGAIVSLNCTYSNSAF | 1230 |
| alternative signal | QYFMWYRQYSRKGPELLMYTYSSGNKEDGRFTAQVDKSSKYISLFIRDSQPS | |
| peptide, Cα | DSATYLCAMTSPYNNNDMRFGAGTRLTVKPNIQNPEPAVYQLKDPRSQDSTL | |
| (substituted) | CLFTDFDSQINVPKTMESGTFITDKCVLDMKAMDSKSNGAIAWSNQTSFTCQ | |
| | DIFKETNATYPSSDVPCDATLTEKSFETDMNLNFQNLLVIVLRILLLKVAGF | |
| | NLLMTLRLWSS | |
| CDR1β | DFQATT | 2221 |
| CDR2β | SNEGSKA | 2222 |
| CDR3β | SGGLEEAARQFI | 2223 |
| Vβ without signal | GSGLGAVVSQHPSWVICKSGTSVKIECRSLDFQATTMFWYRQFPKQSLMLMA | 2224 |
| peptide (SignalP) | TSNEGSKATYEQGVEKDKFLINHASLTLSTLTVTSAHPEDSSFYICSGGLEE | |
| | AARQFIGPGTRLTVL | |
| Vβ without signal | GAVVSQHPSWVICKSGTSVKIECRSLDFQATTMFWYRQFPKQSLMLMATSNE | 2225 |
| peptide (IMGT) | GSKATYEQGVEKDKFLINHASLTLSTLTVTSAHPEDSSFYICSGGLEEAARQ | |
| | FIGPGTRLTVL | |
| Vβ | MXLLLLLLGPGISLLLPGSLAGSGLGAVVSQHPSWVICKSGTSVKIECRSLD | 2226 |
| | FQATTMFWYRQFPKQSLMLMATSNEGSKATYEQGVEKDKFLINHASLTLSTL | 2227 |
| | TVTSAHPEDSSFYICSGGLEEAARQFIGPGTRLTVL | |
| | (X = any amino acid) | |
| β chain with WT signal | MLLLLLLLGPGISLLLPGSLAGSGLGAVVSQHPSWVICKSGTSVKIECRSLD | 2228 |
| peptide, Cβ | FQATTMFWYRQFPKQSLMLMATSNEGSKATYEQGVEKDKFLINHASLTLSTL | |
| (substituted) | TVTSAHPEDSSFYICSGGLEEAARQFIGPGTRLTVLEDLRNVTPPKVSLFEP | |
| | SKAEIANKQKATLVCLARGFFPDHVELSWWVNGKEVHSGVCTDPQAYKESNY | |
| | SYCLSSRLRVSATFWHNPRNHFRCQVQFHGLSEEDKWPEGSPKPVTQNISAE | |
| | AWGRADCGITSASYQQGVLSATILYEILLGKATLYAVLVSTLVVMAMVKRKN | |
| | S | |
| β chain with alternative | MALLLLLLGPGISLLLPGSLAGSGLGAVVSQHPSWVICKSGTSVKIECRSLD | 2229 |
| signal peptide, Cβ | FQATTMFWYRQFPKQSLMLMATSNEGSKATYEQGVEKDKFLINHASLTLSTL | |
| (substituted) | TVTSAHPEDSSFYICSGGLEEAARQFIGPGTRLTVLEDLRNVTPPKVSLFEP | |
| | SKAEIANKQKATLVCLARGFFPDHVELSWWVNGKEVHSGVCTDPQAYKESNY | |
| | SYCLSSRLRVSATFWHNPRNHFRCQVQFHGLSEEDKWPEGSPKPVTQNISAE | |
| | AWGRADCGITSASYQQGVLSATILYEILLGKATLYAVLVSTLVVMAMVKRKN | |
| | S | |
| β chain with alternative | MHLLLLLLGPGISLLLPGSLAGSGLGAVVSQHPSWVICKSGTSVKIECRSLD | 2230 |
| signal peptide, Cβ | FQATTMFWYRQFPKQSLMLMATSNEGSKATYEQGVEKDKFLINHASLTLSTL | |
| (substituted) | TVTSAHPEDSSFYICSGGLEEAARQFIGPGTRLTVLEDLRNVTPPKVSLFEP | |
| | SKAEIANKQKATLVCLARGFFPDHVELSWWVNGKEVHSGVCTDPQAYKESNY | |
| | SYCLSSRLRVSATFWHNPRNHFRCQVQFHGLSEEDKWPEGSPKPVTQNISAE | |
| | AWGRADCGITSASYQQGVLSATILYEILLGKATLYAVLVSTLVVMAMVKRKN | |
| | S | |

[0187] In some embodiments, TCR023 interacts with and/or is specific for p53. In some embodiments, the peptide is from a neoantigen of p53. In some embodiments, the neoantigen has the amino acid change R248Q relative to the wild type p53 sequence. In some embodiments, TCR023 interacts with the neoantigen in the context of HLA-A*02:01, as described in International Publication No. WO 2019/067243, incorporated herein by reference in its entirety.

TABLE 6X
Amino acid sequences of TCR024.

| | | SEQ |
|---|---|---|
| | | ID |
| Description | Sequence | NO: |
| CDR1α | NSAFQY | 1231 |
| CDR2α | TYSSGN | 1232 |
| CDR3α | AMTSPYNNNDMR | 1233 |
| Vα without signal | QQKEVEQDPGPLSVPEGAIVSLNCTYSNSAFQYFMWYRQYSRKGPELLMYTY | 1234 |
| peptide (SignalP) | SSGNKEDGRFTAQVDKSSKYISLFIRDSQPSDSATYLCAMTSPYNNNDMRFG | |
| | AGTRLTVKP | |
| Vα without signal | QKEVEQDPGPLSVPEGAIVSLNCTYSNSAFQYFMWYRQYSRKGPELLMYTYS | 1235 |
| peptide (IMGT) | SGNKEDGRFTAQVDKSSKYISLFIRDSQPSDSATYLCAMTSPYNNNDMRFGA | |
| | GTRLTVKP | |
| Vα | MXKSLRVLLVILWLQLSWVWSQQKEVEQDPGPLSVPEGAIVSLNCTYSNSAF | 1236 |
| | QYFMWYRQYSRKGPELLMYTYSSGNKEDGRFTAQVDKSSKYISLFIRDSQPS | 1237 |
| | DSATYLCAMTSPYNNNDMRFGAGTRLTVKP | |
| | (X = any amino acid) | |
| α chain with WT signal | MCKSLRVLLVILWLQLSWVWSQQKEVEQDPGPLSVPEGAIVSLNCTYSNSAF | 1238 |
| peptide, Cα | QYFMWYRQYSRKGPELLMYTYSSGNKEDGRFTAQVDKSSKYISLFIRDSQPS | |
| (substituted) | DSATYLCAMTSPYNNNDMRFGAGTRLTVKPNIQNPEPAVYQLKDPRSQDSTL | |
| | CLFTDFDSQINVPKTMESGTFITDKCVLDMKAMDSKSNGAIAWSNQTSFTCQ | |
| | DIFKETNATYPSSDVPCDATLTEKSFETDMNLNFQNLLVIVLRILLLKVAGF | |
| | NLLMTLRLWSS | |
| α chain with | MAKSLRVLLVILWLQLSWVWSQQKEVEQDPGPLSVPEGAIVSLNCTYSNSAF | 1239 |
| alternative signal | QYFMWYRQYSRKGPELLMYTYSSGNKEDGRFTAQVDKSSKYISLFIRDSQPS | |
| peptide, Cα | DSATYLCAMTSPYNNNDMRFGAGTRLTVKPNIQNPEPAVYQLKDPRSQDSTL | |
| (substituted) | CLFTDFDSQINVPKTMESGTFITDKCVLDMKAMDSKSNGAIAWSNQTSFTCQ | |
| | DIFKETNATYPSSDVPCDATLTEKSFETDMNLNFQNLLVIVLRILLLKVAGF | |
| | NLLMTLRLWSS | |
| α chain with | MHKSLRVLLVILWLQLSWVWSQQKEVEQDPGPLSVPEGAIVSLNCTYSNSAF | 1240 |
| alternative signal | QYFMWYRQYSRKGPELLMYTYSSGNKEDGRFTAQVDKSSKYISLFIRDSQPS | |
| peptide, Cα | DSATYLCAMTSPYNNNDMRFGAGTRLTVKPNIQNPEPAVYQLKDPRSQDSTL | |
| (substituted) | CLFTDFDSQINVPKTMESGTFITDKCVLDMKAMDSKSNGAIAWSNQTSFTCQ | |
| | DIFKETNATYPSSDVPCDATLTEKSFETDMNLNFQNLLVIVLRILLLKVAGF | |
| | NLLMTLRLWSS | |
| CDR1β | DFQATT | 2231 |
| CDR2β | SNEGSKA | 2232 |
| CDR3β | SGGLEEAARQFI | 2233 |
| Vβ without signal | AVVSQHPSRVICKSGTSVKIECRSLDFQATTMFWYRQFPKQSLMLMATSNEG | 2234 |
| peptide (SignalP) | SKATYEQGVEKDKFLINHASLTLSTLTVTSAHPEDSSFYICSGGLEEAARQF | |
| | IGPGTRLTVL | |
| Vβ without signal | GAVVSQHPSRVICKSGTSVKIECRSLDFQATTMFWYRQFPKQSLMLMATSNE | 2235 |
| peptide (IMGT) | GSKATYEQGVEKDKFLINHASLTLSTLTVTSAHPEDSSFYICSGGLEEAARQ | |
| | FIGPGTRLTVL | |
| Vβ | MXLLLLLLGPAGSGLGAVVSQHPSRVICKSGTSVKIECRSLDFQATTMFWYR | 2236 |
| | QFPKQSLMLMATSNEGSKATYEQGVEKDKFLINHASLTLSTLTVTSAHPEDS | 2237 |
| | SFYICSGGLEEAARQFIGPGTRLTVL | |
| | (X = any amino acid) | |
| β chain with WT signal | MLLLLLLLGPAGSGLGAVVSQHPSRVICKSGTSVKIECRSLDFQATTMFWYR | 2238 |
| peptide, Cβ | QFPKQSLMLMATSNEGSKATYEQGVEKDKFLINHASLTLSTLTVTSAHPEDS | |
| (substituted) | SFYICSGGLEEAARQFIGPGTRLTVLEDLRNVTPPKVSLFEPSKAEIANKQK | |
| | ATLVCLARGFFPDHVELSWWVNGKEVHSGVCTDPQAYKESNYSYCLSSRLRV | |
| | SATFWHNPRNHFRCQVQFHGLSEEDKWPEGSPKPVTQNISAEAWGRADCGIT | |
| | SASYQQGVLSATILYEILLGKATLYAVLVSTLVVMAMVKRKNS | |
| β chain with alternative | MALLLLLLGPAGSGLGAVVSQHPSRVICKSGTSVKIECRSLDFQATTMFWYR | 2239 |
| signal peptide, Cβ | QFPKQSLMLMATSNEGSKATYEQGVEKDKFLINHASLTLSTLTVTSAHPEDS | |
| (substituted) | SFYICSGGLEEAARQFIGPGTRLTVLEDLRNVTPPKVSLFEPSKAEIANKQK | |
| | ATLVCLARGFFPDHVELSWWVNGKEVHSGVCTDPQAYKESNYSYCLSSRLRV | |
| | SATFWHNPRNHFRCQVQFHGLSEEDKWPEGSPKPVTQNISAEAWGRADCGIT | |
| | SASYQQGVLSATILYEILLGKATLYAVLVSTLVVMAMVKRKNS | |
| β chain with alternative | MHLLLLLLGPAGSGLGAVVSQHPSRVICKSGTSVKIECRSLDFQATTMFWYR | 2240 |
| signal peptide, Cβ | QFPKQSLMLMATSNEGSKATYEQGVEKDKFLINHASLTLSTLTVTSAHPEDS | |
| (substituted) | SFYICSGGLEEAARQFIGPGTRLTVLEDLRNVTPPKVSLFEPSKAEIANKQK | |
| | ATLVCLARGFFPDHVELSWWVNGKEVHSGVCTDPQAYKESNYSYCLSSRLRV | |
| | SATFWHNPRNHFRCQVQFHGLSEEDKWPEGSPKPVTQNISAEAWGRADCGIT | |
| | SASYQQGVLSATILYEILLGKATLYAVLVSTLVVMAMVKRKNS | |

[0188] In some embodiments, TCR024 interacts with and/or is specific for p53. In some embodiments, the peptide is from a neoantigen of p53. In some embodiments, the neoantigen has the amino acid change R248Q relative to the wild type p53 sequence. In some embodiments, TCR024 interacts with the neoantigen in the context of HLA-A*02:01, as described in International Publication No. WO 2019/067243, incorporated herein by reference in its entirety.

TABLE 6Y
Amino acid sequences of TCR025.

| | | SEQ |
|---|---|---|
| | | ID |
| Description | Sequence | NO: |
| CDR1α | TISGNEY | 1241 |
| CDR2α | GLKNN | 1242 |
| CDR3α | IVPNDYKLS | 1243 |
| Vα without signal | KTTQPPSMDCAEGRAANLPCNHSTISGNEYVYWYRQIHSQGPQYIIHGLKNN | 1244 |
| peptide (SignalP) | ETNEMASLIITEDRKSSTLILPHATLRDTAVYYCIVPNDYKLSFGAGTTVTV | |
| | RA | |
| Vα without signal | DAKTTQPPSMDCAEGRAANLPCNHSTISGNEYVYWYRQIHSQGPQYIIHGLK | 1245 |
| peptide (IMGT) | NNETNEMASLIITEDRKSSTLILPHATLRDTAVYYCIVPNDYKLSFGAGTTV | |
| | TVRA | |
| Vα | MXLVARVTVFLTFGTIIDAKTTQPPSMDCAEGRAANLPCNHSTISGNEYVYW | 1246 |
| | YRQIHSQGPQYIIHGLKNNETNEMASLIITEDRKSSTLILPHATLRDTAVYY | 1247 |
| | CIVPNDYKLSFGAGTTVTVRA | |
| | (X = any amino acid) | |
| α chain with WT signal | MRLVARVTVFLTFGTIIDAKTTQPPSMDCAEGRAANLPCNHSTISGNEYVYW | 1248 |
| peptide, Cα | YRQIHSQGPQYIIHGLKNNETNEMASLIITEDRKSSTLILPHATLRDTAVYY | |
| (substituted) | CIVPNDYKLSFGAGTTVTVRANIQNPEPAVYQLKDPRSQDSTLCLFTDFDSQ | |
| | INVPKTMESGTFITDKCVLDMKAMDSKSNGAIAWSNQTSFTCQDIFKETNAT | |
| | YPSSDVPCDATLTEKSFETDMNLNFQNLLVIVLRILLLKVAGFNLLMTLRLW | |
| | SS | |
| α chain with | MALVARVTVFLTFGTIIDAKTTQPPSMDCAEGRAANLPCNHSTISGNEYVYW | 1249 |
| alternative signal | YRQIHSQGPQYIIHGLKNNETNEMASLIITEDRKSSTLILPHATLRDTAVYY | |
| peptide, Cα | CIVPNDYKLSFGAGTTVTVRANIQNPEPAVYQLKDPRSQDSTLCLFTDFDSQ | |
| (substituted) | INVPKTMESGTFITDKCVLDMKAMDSKSNGAIAWSNQTSFTCQDIFKETNAT | |
| | YPSSDVPCDATLTEKSFETDMNLNFQNLLVIVLRILLLKVAGFNLLMTLRLW | |
| | SS | |
| α chain with | MHLVARVTVFLTFGTIIDAKTTQPPSMDCAEGRAANLPCNHSTISGNEYVYW | 1250 |
| alternative signal | YRQIHSQGPQYIIHGLKNNETNEMASLIITEDRKSSTLILPHATLRDTAVYY | |
| peptide, Cα | CIVPNDYKLSFGAGTTVTVRANIQNPEPAVYQLKDPRSQDSTLCLFTDFDSQ | |
| (substituted) | INVPKTMESGTFITDKCVLDMKAMDSKSNGAIAWSNQTSFTCQDIFKETNAT | |
| | YPSSDVPCDATLTEKSFETDMNLNFQNLLVIVLRILLLKVAGFNLLMTLRLW | |
| | SS | |
| CDR1β | MDHEN | 2241 |
| CDR2β | SYDVKM | 2242 |
| CDR3β | ASSFGTGSIQETQY | 2243 |
| Vβ without signal | SRYLVKRTGEKVFLECVQDMDHENMFWYRQDPGLGLRLIYFSYDVKMKEKGD | 2244 |
| peptide (SignalP) | IPEGYSVSREKKERFSLILESASTNQTSMYLCASSFGTGSIQETQYFGPGTR | |
| | LLVL | |
| Vβ without signal | DVKVTQSSRYLVKRTGEKVFLECVQDMDHENMFWYRQDPGLGLRLIYFSYDV | 2245 |
| peptide (IMGT) | KMKEKGDIPEGYSVSREKKERFSLILESASTNQTSMYLCASSFGTGSIQETQ | |
| | YFGPGTRLLVL | |
| Vβ | MXIRLLCRVAFCFLAVGLVDVKVTQSSRYLVKRTGEKVFLECVQDMDHENMF | 2246 |
| | WYRQDPGLGLRLIYFSYDVKMKEKGDIPEGYSVSREKKERFSLILESASTNQ | 2247 |
| | TSMYLCASSFGTGSIQETQYFGPGTRLLVL | |
| | (X = any amino acid) | |
| β chain with WT signal | MGIRLLCRVAFCFLAVGLVDVKVTQSSRYLVKRTGEKVFLECVQDMDHENMF | 2248 |
| peptide, Cβ | WYRQDPGLGLRLIYFSYDVKMKEKGDIPEGYSVSREKKERFSLILESASTNQ | |
| (substituted) | TSMYLCASSFGTGSIQETQYFGPGTRLLVLEDLRNVTPPKVSLFEPSKAEIA | |
| | NKQKATLVCLARGFFPDHVELSWWVNGKEVHSGVCTDPQAYKESNYSYCLSS | |
| | RLRVSATFWHNPRNHFRCQVQFHGLSEEDKWPEGSPKPVTQNISAEAWGRAD | |
| | CGITSASYQQGVLSATILYEILLGKATLYAVLVSTLVVMAMVKRKNS | |
| β chain with alternative | MAIRLLCRVAFCFLAVGLVDVKVTQSSRYLVKRTGEKVFLECVQDMDHENMF | 2249 |
| signal peptide, Cβ | WYRQDPGLGLRLIYFSYDVKMKEKGDIPEGYSVSREKKERFSLILESASTNQ | |
| (substituted) | TSMYLCASSFGTGSIQETQYFGPGTRLLVLEDLRNVTPPKVSLFEPSKAEIA | |
| | NKQKATLVCLARGFFPDHVELSWWVNGKEVHSGVCTDPQAYKESNYSYCLSS | |
| | RLRVSATFWHNPRNHFRCQVQFHGLSEEDKWPEGSPKPVTQNISAEAWGRAD | |
| | CGITSASYQQGVLSATILYEILLGKATLYAVLVSTLVVMAMVKRKNS | |
| β chain with alternative | MHIRLLCRVAFCFLAVGLVDVKVTQSSRYLVKRTGEKVFLECVQDMDHENMF | 2250 |
| signal peptide, Cβ | WYRQDPGLGLRLIYFSYDVKMKEKGDIPEGYSVSREKKERFSLILESASTNQ | |
| (substituted) | TSMYLCASSFGTGSIQETQYFGPGTRLLVLEDLRNVTPPKVSLFEPSKAEIA | |
| | NKQKATLVCLARGFFPDHVELSWWVNGKEVHSGVCTDPQAYKESNYSYCLSS | |
| | RLRVSATFWHNPRNHFRCQVQFHGLSEEDKWPEGSPKPVTQNISAEAWGRAD | |
| | CGITSASYQQGVLSATILYEILLGKATLYAVLVSTLVVMAMVKRKNS | |

[0189] In some embodiments, TCR025 interacts with and/or is specific for p53. In some embodiments, the peptide is from a neoantigen of p53. In some embodiments, the neoantigen has the amino acid change R248Q relative to the wild type p53 sequence. In some embodiments, TCR025 interacts with the neoantigen in the context of HLA-A*02:01, as described in International Publication No. WO 2019/067243, incorporated herein by reference in its entirety.

TABLE 6Z
Amino acid sequences of TCR026

| | | SEQ |
|---|---|---|
| | | ID |
| Description | Sequence | NO: |
| CDR1α | ATGYPS | 1251 |
| CDR2α | ATKADDK | 1252 |
| CDR3α | ALNPNAGGTSYGKLT | 1253 |
| Vα without signal | NSVTQMEGPVTLSEEAFLTINCTYTATGYPSLFWYVQYPGEGLQLLLKATKA | 1254 |
| peptide (SignalP) | DDKGSNKGFEATYRKETTSFHLEKGSVQVSDSAVYFCALNPNAGGTSYGKLT | |
| | FGQGTILTVHP | |
| Vα without signal | GNSVTQMEGPVTLSEEAFLTINCTYTATGYPSLFWYVQYPGEGLQLLLKATK | 1255 |
| peptide (IMGT) | ADDKGSNKGFEATYRKETTSFHLEKGSVQVSDSAVYFCALNPNAGGTSYGKL | |
| | TFGQGTILTVHP | |
| Vα | MXYSPGLVSLILLLLGRTRGNSVTQMEGPVTLSEEAFLTINCTYTATGYPSL | 1256 |
| | FWYVQYPGEGLQLLLKATKADDKGSNKGFEATYRKETTSFHLEKGSVQVSDS | 1257 |
| | AVYFCALNPNAGGTSYGKLTFGQGTILTVHP | |
| | (X = any amino acid) | |
| α chain with WT signal | MNYSPGLVSLILLLLGRTRGNSVTQMEGPVTLSEEAFLTINCTYTATGYPSL | 1258 |
| peptide, Cα | FWYVQYPGEGLQLLLKATKADDKGSNKGFEATYRKETTSFHLEKGSVQVSDS | |
| (substituted) | AVYFCALNPNAGGTSYGKLTFGQGTILTVHPNIQNPEPAVYQLKDPRSQDST | |
| | LCLFTDFDSQINVPKTMESGTFITDKCVLDMKAMDSKSNGAIAWSNQTSFTC | |
| | QDIFKETNATYPSSDVPCDATLTEKSFETDMNLNFQNLLVIVLRILLLKVAG | |
| | FNLLMTLRLWSS | |
| α chain with | MAYSPGLVSLILLLLGRTRGNSVTQMEGPVTLSEEAFLTINCTYTATGYPSL | 1259 |
| alternative signal | FWYVQYPGEGLQLLLKATKADDKGSNKGFEATYRKETTSFHLEKGSVQVSDS | |
| peptide, Cα | AVYFCALNPNAGGTSYGKLTFGQGTILTVHPNIQNPEPAVYQLKDPRSQDST | |
| (substituted) | LCLFTDFDSQINVPKTMESGTFITDKCVLDMKAMDSKSNGAIAWSNQTSFTC | |
| | QDIFKETNATYPSSDVPCDATLTEKSFETDMNLNFQNLLVIVLRILLLKVAG | |
| | FNLLMTLRLWSS | |
| α chain with | MHYSPGLVSLILLLLGRTRGNSVTQMEGPVTLSEEAFLTINCTYTATGYPSL | 1260 |
| alternative signal | FWYVQYPGEGLQLLLKATKADDKGSNKGFEATYRKETTSFHLEKGSVQVSDS | |
| peptide, Cα | AVYFCALNPNAGGTSYGKLTFGQGTILTVHPNIQNPEPAVYQLKDPRSQDST | |
| (substituted) | LCLFTDFDSQINVPKTMESGTFITDKCVLDMKAMDSKSNGAIAWSNQTSFTC | |
| | QDIFKETNATYPSSDVPCDATLTEKSFETDMNLNFQNLLVIVLRILLLKVAG | |
| | FNLLMTLRLWSS | |
| CDR1β | SGHTS | 2251 |
| CDR2β | YDEGEE | 2252 |
| CDR3β | ASSSPGATSGGANTGELF | 2253 |
| Vβ without signal | GVTQSPTHLIKTRGQQATLRCSPISGHTSVYWYQQALGLGLQFLLWYDEGEE | 2254 |
| peptide (SignalP) | RNRGNFPPRFSGRQFPNYSSELNVNALELEDSALYLCASSSPGATSGGANTG | |
| | ELFFGEGSRLTVL | |
| Vβ without signal | EAGVTQSPTHLIKTRGQQATLRCSPISGHTSVYWYQQALGLGLQFLLWYDEG | 2255 |
| peptide (IMGT) | EERNRGNFPPRFSGRQFPNYSSELNVNALELEDSALYLCASSSPGATSGGAN | |
| | TGELFFGEGSRLTVL | |
| Vβ | MXPRLLFWALLCLLGTGPVEAGVTQSPTHLIKTRGQQATLRCSPISGHTSVY | 2256 |
| | WYQQALGLGLQFLLWYDEGEERNRGNFPPRFSGRQFPNYSSELNVNALELED | 2257 |
| | SALYLCASSSPGATSGGANTGELFFGEGSRLTVL | |
| | (X = any amino acid) | |
| β chain with WT signal | MGPRLLFWALLCLLGTGPVEAGVTQSPTHLIKTRGQQATLRCSPISGHTSVY | 2258 |
| peptide, Cβ | WYQQALGLGLQFLLWYDEGEERNRGNFPPRFSGRQFPNYSSELNVNALELED | |
| (substituted) | SALYLCASSSPGATSGGANTGELFFGEGSRLTVLEDLRNVTPPKVSLFEPSK | |
| | AEIANKQKATLVCLARGFFPDHVELSWWVNGKEVHSGVCTDPQAYKESNYSY | |
| | CLSSRLRVSATFWHNPRNHFRCQVQFHGLSEEDKWPEGSPKPVTQNISAEAW | |
| | GRADCGITSASYQQGVLSATILYEILLGKATLYAVLVSTLVVMAMVKRKNS | |
| β chain with alternative | MAPRLLFWALLCLLGTGPVEAGVTQSPTHLIKTRGQQATLRCSPISGHTSVY | 2259 |
| signal peptide, Cβ | WYQQALGLGLQFLLWYDEGEERNRGNFPPRFSGRQFPNYSSELNVNALELED | |
| (substituted) | SALYLCASSSPGATSGGANTGELFFGEGSRLTVLEDLRNVTPPKVSLFEPSK | |
| | AEIANKQKATLVCLARGFFPDHVELSWWVNGKEVHSGVCTDPQAYKESNYSY | |
| | CLSSRLRVSATFWHNPRNHFRCQVQFHGLSEEDKWPEGSPKPVTQNISAEAW | |
| | GRADCGITSASYQQGVLSATILYEILLGKATLYAVLVSTLVVMAMVKRKNS | |
| β chain with alternative | MHPRLLFWALLCLLGTGPVEAGVTQSPTHLIKTRGQQATLRCSPISGHTSVY | 2260 |
| signal peptide, Cβ | WYQQALGLGLQFLLWYDEGEERNRGNFPPRFSGRQFPNYSSELNVNALELED | |
| (substituted) | SALYLCASSSPGATSGGANTGELFFGEGSRLTVLEDLRNVTPPKVSLFEPSK | |
| | AEIANKQKATLVCLARGFFPDHVELSWWVNGKEVHSGVCTDPQAYKESNYSY | |
| | CLSSRLRVSATFWHNPRNHFRCQVQFHGLSEEDKWPEGSPKPVTQNISAEAW | |
| | GRADCGITSASYQQGVLSATILYEILLGKATLYAVLVSTLVVMAMVKRKNS | |

[0190] In some embodiments, TCR026 interacts with and/or is specific for p53. In some embodiments, the peptide is from a neoantigen of p53. In some embodiments, the neoantigen has the amino acid change R248Q relative to the wild type p53 sequence. In some embodiments, TCR026 interacts with the neoantigen in the context of HLA-A*02:01, as described in International Publication No. WO 2019/067243, incorporated herein by reference in its entirety.

TABLE 6AA
Amino acid sequences of TCR027.

| | | SEQ |
|---|---|---|
| | | ID |
| Description | Sequence | NO: |
| CDR1α | DSSSTY | 1261 |
| CDR2α | IFSNMDM | 1262 |
| CDR3α | AEIPRDSGGGADGLT | 1263 |
| Vα without signal | EDVEQSLFLSVREGDSSVINCTYTDSSSTYLYWYKQEPGAGLQLLTYIFSNM | 1264 |
| peptide (SignalP) | DMKQDQRLTVLLNKKDKHLSLRIADTQTGDSAIYFCAEIPRDSGGGADGLTF | |
| | GKGTHLIIQP | |
| Vα without signal | GEDVEQSLFLSVREGDSSVINCTYTDSSSTYLYWYKQEPGAGLQLLTYIFSN | 1265 |
| peptide (IMGT) | MDMKQDQRLTVLLNKKDKHLSLRIADTQTGDSAIYFCAEIPRDSGGGADGLT | |
| | FGKGTHLIIQP | |
| Vα | MXTFAGFSFLFLWLQLDCMSRGEDVEQSLFLSVREGDSSVINCTYTDSSSTY | 1266 |
| | LYWYKQEPGAGLQLLTYIFSNMDMKQDQRLTVLLNKKDKHLSLRIADTQTGD | 1267 |
| | SAIYFCAEIPRDSGGGADGLTFGKGTHLIIQP | |
| | (X = any amino acid) | |
| α chain with WT signal | MKTFAGFSFLFLWLQLDCMSRGEDVEQSLFLSVREGDSSVINCTYTDSSSTY | 1268 |
| peptide, Cα | LYWYKQEPGAGLQLLTYIFSNMDMKQDQRLTVLLNKKDKHLSLRIADTQTGD | |
| (substituted) | SAIYFCAEIPRDSGGGADGLTFGKGTHLIIQPNIQNPEPAVYQLKDPRSQDS | |
| | TLCLFTDFDSQINVPKTMESGTFITDKCVLDMKAMDSKSNGAIAWSNQTSFT | |
| | CQDIFKETNATYPSSDVPCDATLTEKSFETDMNLNFQNLLVIVLRILLLKVA | |
| | GFNLLMTLRLWSS | |
| α chain with | MATFAGFSFLFLWLQLDCMSRGEDVEQSLFLSVREGDSSVINCTYTDSSSTY | 1269 |
| alternative signal | LYWYKQEPGAGLQLLTYIFSNMDMKQDQRLTVLLNKKDKHLSLRIADTQTGD | |
| peptide, Cα | SAIYFCAEIPRDSGGGADGLTFGKGTHLIIQPNIQNPEPAVYQLKDPRSQDS | |
| (substituted) | TLCLFTDFDSQINVPKTMESGTFITDKCVLDMKAMDSKSNGAIAWSNQTSFT | |
| | CQDIFKETNATYPSSDVPCDATLTEKSFETDMNLNFQNLLVIVLRILLLKVA | |
| | GFNLLMTLRLWSS | |
| α chain with | MHTFAGFSFLFLWLQLDCMSRGEDVEQSLFLSVREGDSSVINCTYTDSSSTY | 1270 |
| alternative signal | LYWYKQEPGAGLQLLTYIFSNMDMKQDQRLTVLLNKKDKHLSLRIADTQTGD | |
| peptide, Cα | SAIYFCAEIPRDSGGGADGLTFGKGTHLIIQPNIQNPEPAVYQLKDPRSQDS | |
| (substituted) | TLCLFTDFDSQINVPKTMESGTFITDKCVLDMKAMDSKSNGAIAWSNQTSFT | |
| | CQDIFKETNATYPSSDVPCDATLTEKSFETDMNLNFQNLLVIVLRILLLKVA | |
| | GFNLLMTLRLWSS | |
| CDR1β | DFQATT | 2261 |
| CDR2β | SNEGSKA | 2262 |
| CDR3β | SARDLQRSYEQY | 2263 |
| Vβ without signal | GSGLGAVVSQHPSWVICKSGTSVKIECRSLDFQATTMFWYRQFPKQSLMLMA | 2264 |
| peptide (SignalP) | TSNEGSKATYEQGVEKDKFLINHASLTLSTLTVTSAHPEDSSFYICSARDLQ | |
| | RSYEQYFGPGTRLTVT | |
| Vβ without signal | GAVVSQHPSWVICKSGTSVKIECRSLDFQATTMFWYRQFPKQSLMLMATSNE | 2265 |
| peptide (IMGT) | GSKATYEQGVEKDKFLINHASLTLSTLTVTSAHPEDSSFYICSARDLQRSYE | |
| | QYFGPGTRLTVT | |
| Vβ | MXLLLLLLGPGISLLLPGSLAGSGLGAVVSQHPSWVICKSGTSVKIECRSLD | 2266 |
| | FQATTMFWYRQFPKQSLMLMATSNEGSKATYEQGVEKDKFLINHASLTLSTL | 2267 |
| | TVTSAHPEDSSFYICSARDLQRSYEQYFGPGTRLTVT | |
| | (X = any amino acid) | |
| β chain with WT signal | MLLLLLLLGPGISLLLPGSLAGSGLGAVVSQHPSWVICKSGTSVKIECRSLD | 2268 |
| peptide, Cβ | FQATTMFWYRQFPKQSLMLMATSNEGSKATYEQGVEKDKFLINHASLTLSTL | |
| (substituted) | TVTSAHPEDSSFYICSARDLQRSYEQYFGPGTRLTVTEDLRNVTPPKVSLFE | |
| | PSKAEIANKQKATLVCLARGFFPDHVELSWWVNGKEVHSGVCTDPQAYKESN | |
| | YSYCLSSRLRVSATFWHNPRNHFRCQVQFHGLSEEDKWPEGSPKPVTQNISA | |
| | EAWGRADCGITSASYQQGVLSATILYEILLGKATLYAVLVSTLVVMAMVKRK | |
| | NS | |
| β chain with alternative | MALLLLLLGPGISLLLPGSLAGSGLGAVVSQHPSWVICKSGTSVKIECRSLD | 2269 |
| signal peptide, Cβ | FQATTMFWYRQFPKQSLMLMATSNEGSKATYEQGVEKDKFLINHASLTLSTL | |
| (substituted) | TVTSAHPEDSSFYICSARDLQRSYEQYFGPGTRLTVTEDLRNVTPPKVSLFE | |
| | PSKAEIANKQKATLVCLARGFFPDHVELSWWVNGKEVHSGVCTDPQAYKESN | |
| | YSYCLSSRLRVSATFWHNPRNHFRCQVQFHGLSEEDKWPEGSPKPVTQNISA | |
| | EAWGRADCGITSASYQQGVLSATILYEILLGKATLYAVLVSTLVVMAMVKRK | |
| | NS | |
| β chain with alternative | MHLLLLLLGPGISLLLPGSLAGSGLGAVVSQHPSWVICKSGTSVKIECRSLD | 2270 |
| signal peptide, Cβ | FQATTMFWYRQFPKQSLMLMATSNEGSKATYEQGVEKDKFLINHASLTLSTL | |
| (substituted) | TVTSAHPEDSSFYICSARDLQRSYEQYFGPGTRLTVTEDLRNVTPPKVSLFE | |
| | PSKAEIANKQKATLVCLARGFFPDHVELSWWVNGKEVHSGVCTDPQAYKESN | |
| | YSYCLSSRLRVSATFWHNPRNHFRCQVQFHGLSEEDKWPEGSPKPVTQNISA | |
| | EAWGRADCGITSASYQQGVLSATILYEILLGKATLYAVLVSTLVVMAMVKRK | |
| | NS | |

[0191] In some embodiments, TCR027 interacts with and/or is specific for p53. In some embodiments, the peptide is from a neoantigen of p53. In some embodiments, the neoantigen has the amino acid change R248Q relative to the wild type p53 sequence. In some embodiments, TCR27 interacts with the neoantigen in the context of HLA-A*02:01, as described in International Publication No. WO 2019/067243, incorporated herein by reference in its entirety.

TABLE 6AB
Amino acid sequences of TCR028.

| | | SEQ |
|---|---|---|
| | | ID |
| Description | Sequence | NO: |
| CDR1α | DSSSTY | 1271 |
| CDR2α | IFSNMDM | 1272 |
| CDR3α | AEIPRDSGGGADGLT | 1273 |
| Vα without signal | EDVEQSLFLSVREGDSSVINCTYTDSSSTYLYWYKQEPGAGLQLLTYIFSNM | 1274 |
| peptide (SignalP) | DMKQDQRLTVLLNKKDKHLSLRIADTQTGDSAIYFCAEIPRDSGGGADGLTF | |
| | GKGTHLIIQP | |
| Vα without signal | GEDVEQSLFLSVREGDSSVINCTYTDSSSTYLYWYKQEPGAGLQLLTYIFSN | 1275 |
| peptide (IMGT) | MDMKQDQRLTVLLNKKDKHLSLRIADTQTGDSAIYFCAEIPRDSGGGADGLT | |
| | FGKGTHLIIQP | |
| Vα | MXTFAGFSFLFLWLQLDCMSRGEDVEQSLFLSVREGDSSVINCTYTDSSSTY | 1276 |
| | LYWYKQEPGAGLQLLTYIFSNMDMKQDQRLTVLLNKKDKHLSLRIADTQTGD | 1277 |
| | SAIYFCAEIPRDSGGGADGLTFGKGTHLIIQP | |
| | (X = any amino acid) | |
| α chain with WT signal | MKTFAGFSFLFLWLQLDCMSRGEDVEQSLFLSVREGDSSVINCTYTDSSSTY | 1278 |
| peptide, Cα | LYWYKQEPGAGLQLLTYIFSNMDMKQDQRLTVLLNKKDKHLSLRIADTQTGD | |
| (substituted) | SAIYFCAEIPRDSGGGADGLTFGKGTHLIIQPNIQNPEPAVYQLKDPRSQDS | |
| | TLCLFTDFDSQINVPKTMESGTFITDKCVLDMKAMDSKSNGAIAWSNQTSFT | |
| | CQDIFKETNATYPSSDVPCDATLTEKSFETDMNLNFQNLLVIVLRILLLKVA | |
| | GFNLLMTLRLWSS | |
| α chain with | MATFAGFSFLFLWLQLDCMSRGEDVEQSLFLSVREGDSSVINCTYTDSSSTY | 1279 |
| alternative signal | LYWYKQEPGAGLQLLTYIFSNMDMKQDQRLTVLLNKKDKHLSLRIADTQTGD | |
| peptide, Cα | SAIYFCAEIPRDSGGGADGLTFGKGTHLIIQPNIQNPEPAVYQLKDPRSQDS | |
| (substituted) | TLCLFTDFDSQINVPKTMESGTFITDKCVLDMKAMDSKSNGAIAWSNQTSFT | |
| | CQDIFKETNATYPSSDVPCDATLTEKSFETDMNLNFQNLLVIVLRILLLKVA | |
| | GFNLLMTLRLWSS | |
| α chain with | MHTFAGFSFLFLWLQLDCMSRGEDVEQSLFLSVREGDSSVINCTYTDSSSTY | 1280 |
| alternative signal | LYWYKQEPGAGLQLLTYIFSNMDMKQDQRLTVLLNKKDKHLSLRIADTQTGD | |
| peptide, Cα | SAIYFCAEIPRDSGGGADGLTFGKGTHLIIQPNIQNPEPAVYQLKDPRSQDS | |
| (substituted) | TLCLFTDFDSQINVPKTMESGTFITDKCVLDMKAMDSKSNGAIAWSNQTSFT | |
| | CQDIFKETNATYPSSDVPCDATLTEKSFETDMNLNFQNLLVIVLRILLLKVA | |
| | GFNLLMTLRLWSS | |
| CDR1β | DFQATT | 2271 |
| CDR2β | SNEGSKA | 2272 |
| CDR3β | SARDLQRSYEQY | 2273 |
| Vβ without signal | AVVSQHPSRVICKSGTSVKIECRSLDFQATTMFWYRQFPKQSLMLMATSNEG | 2274 |
| peptide (SignalP) | SKATYEQGVEKDKFLINHASLTLSTLTVTSAHPEDSSFYICSARDLQRSYEQ | |
| | YFGPGTRLTVT | |
| Vβ without signal | GAVVSQHPSRVICKSGTSVKIECRSLDFQATTMFWYRQFPKQSLMLMATSNE | 2275 |
| peptide (IMGT) | GSKATYEQGVEKDKFLINHASLTLSTLTVTSAHPEDSSFYICSARDLQRSYE | |
| | QYFGPGTRLTVT | |
| Vβ | MXLLLLLLGPAGSGLGAVVSQHPSRVICKSGTSVKIECRSLDFQATTMFWYR | 2276 |
| | QFPKQSLMLMATSNEGSKATYEQGVEKDKFLINHASLTLSTLTVTSAHPEDS | 2277 |
| | SFYICSARDLQRSYEQYFGPGTRLTVT | |
| | (X = any amino acid) | |
| β chain with WT signal | MLLLLLLLGPAGSGLGAVVSQHPSRVICKSGTSVKIECRSLDFQATTMFWYR | 2278 |
| peptide, Cβ | QFPKQSLMLMATSNEGSKATYEQGVEKDKFLINHASLTLSTLTVTSAHPEDS | |
| (substituted) | SFYICSARDLQRSYEQYFGPGTRLTVTEDLRNVTPPKVSLFEPSKAEIANKQ | |
| | KATLVCLARGFFPDHVELSWWVNGKEVHSGVCTDPQAYKESNYSYCLSSRLR | |
| | VSATFWHNPRNHFRCQVQFHGLSEEDKWPEGSPKPVTQNISAEAWGRADCGI | |
| | TSASYQQGVLSATILYEILLGKATLYAVLVSTLVVMAMVKRKNS | |
| β chain with alternative | MALLLLLLGPAGSGLGAVVSQHPSRVICKSGTSVKIECRSLDFQATTMFWYR | 2279 |
| signal peptide, Cβ | QFPKQSLMLMATSNEGSKATYEQGVEKDKFLINHASLTLSTLTVTSAHPEDS | |
| (substituted) | SFYICSARDLQRSYEQYFGPGTRLTVTEDLRNVTPPKVSLFEPSKAEIANKQ | |
| | KATLVCLARGFFPDHVELSWWVNGKEVHSGVCTDPQAYKESNYSYCLSSRLR | |
| | VSATFWHNPRNHFRCQVQFHGLSEEDKWPEGSPKPVTQNISAEAWGRADCGI | |
| | TSASYQQGVLSATILYEILLGKATLYAVLVSTLVVMAMVKRKNS | |
| β chain with alternative | MHLLLLLLGPAGSGLGAVVSQHPSRVICKSGTSVKIECRSLDFQATTMFWYR | 2280 |
| signal peptide, Cβ | QFPKQSLMLMATSNEGSKATYEQGVEKDKFLINHASLTLSTLTVTSAHPEDS | |
| (substituted) | SFYICSARDLQRSYEQYFGPGTRLTVTEDLRNVTPPKVSLFEPSKAEIANKQ | |
| | KATLVCLARGFFPDHVELSWWVNGKEVHSGVCTDPQAYKESNYSYCLSSRLR | |
| | VSATFWHNPRNHFRCQVQFHGLSEEDKWPEGSPKPVTQNISAEAWGRADCGI | |
| | TSASYQQGVLSATILYEILLGKATLYAVLVSTLVVMAMVKRKNS | |

[0192] In some embodiments, TCR028 interacts with and/or is specific for p53. In some embodiments, the peptide is from a neoantigen of p53. In some embodiments, the neoantigen has the amino acid change R248Q relative to the wild type p53 sequence. In some embodiments, TCR028 interacts with the neoantigen in the context of HLA-A*02:01, as described in International Publication No. WO 2019/067243, incorporated herein by reference in its entirety.

TABLE 6AC
Amino acid sequences of TCR029.

| | | SEQ |
|---|---|---|
| | | ID |
| Description | Sequence | NO: |
| CDR1α | NSASDY | 1281 |
| CDR2α | IRSNMDK | 1282 |
| CDR3α | AEPVGGLNSGYALN | 1283 |
| Vα without signal | ESVGLHLPTLSVQEGDNSIINCAYSNSASDYFIWYKQESGKGPQFIIDIRSN | 1284 |
| peptide (SignalP) | MDKRQGQRVTVLLNKTVKHLSLQIAATQPGDSAVYFCAEPVGGLNSGYALNF | |
| | GKGTSLLVTP | |
| Vα without signal | GESVGLHLPTLSVQEGDNSIINCAYSNSASDYFIWYKQESGKGPQFIIDIRS | 1285 |
| peptide (IMGT) | NMDKRQGQRVTVLLNKTVKHLSLQIAATQPGDSAVYFCAEPVGGLNSGYALN | |
| | FGKGTSLLVTP | |
| Vα | MXGIRALFMYLWLQLDWVSRGESVGLHLPTLSVQEGDNSIINCAYSNSASDY | 1286 |
| | FIWYKQESGKGPQFIIDIRSNMDKRQGQRVTVLLNKTVKHLSLQIAATQPGD | 1287 |
| | SAVYFCAEPVGGLNSGYALNFGKGTSLLVTP | |
| | (X = any amino acid) | |
| α chain with WT signal | MAGIRALFMYLWLQLDWVSRGESVGLHLPTLSVQEGDNSIINCAYSNSASDY | 1288 |
| peptide, Cα | FIWYKQESGKGPQFIIDIRSNMDKRQGQRVTVLLNKTVKHLSLQIAATQPGD | |
| | SAVYFCAEPVGGLNSGYALNFGKGTSLLVTPNIQNPEPAVYQLKDPRSQDST | |
| (substituted) | LCLFTDFDSQINVPKTMESGTFITDKCVLDMKAMDSKSNGAIAWSNQTSFTC | 1289 |
| | QDIFKETNATYPSSDVPCDATLTEKSFETDMNLNFQNLLVIVLRILLLKVAG | |
| | FNLLMTLRLWSS | |
| α chain with | MHGIRALFMYLWLQLDWVSRGESVGLHLPTLSVQEGDNSIINCAYSNSASDY | 1290 |
| alternative signal | FIWYKQESGKGPQFIIDIRSNMDKRQGQRVTVLLNKTVKHLSLQIAATQPGD | |
| peptide, Cα | SAVYFCAEPVGGLNSGYALNFGKGTSLLVTPNIQNPEPAVYQLKDPRSQDST | |
| (substituted) | LCLFTDFDSQINVPKTMESGTFITDKCVLDMKAMDSKSNGAIAWSNQTSFTC | |
| | QDIFKETNATYPSSDVPCDATLTEKSFETDMNLNFQNLLVIVLRILLLKVAG | |
| | FNLLMTLRLWSS | |
| CDR1β | SGHKS | 2281 |
| CDR2β | QYYEKEE | 2282 |
| CDR3β | ASSGGRTSGAYEQF | 2283 |
| Vβ without signal | GVTQSPTHLIKTRGQQVTLRCSPISGHKSVSWYQQVLGQGPQFIFQYYEKEE | 2284 |
| peptide (SignalP) | RGRGNFPDRFSARQFPNYSSELNVNALLLGDSALYLCASSGGRTSGAYEQFF | |
| | GPGTRLTVL | |
| Vβ without signal | DAGVTQSPTHLIKTRGQQVTLRCSPISGHKSVSWYQQVLGQGPQFIFQYYEK | 2285 |
| peptide (IMGT) | EERGRGNFPDRFSARQFPNYSSELNVNALLLGDSALYLCASSGGRTSGAYEQ | |
| | FFGPGTRLTVL | |
| Vβ | MXPGLLCWVLLCLLGAGPVDAGVTQSPTHLIKTRGQQVTLRCSPISGHKSVS | 2286 |
| | WYQQVLGQGPQFIFQYYEKEERGRGNFPDRESARQFPNYSSELNVNALLLGD | 2287 |
| | SALYLCASSGGRTSGAYEQFFGPGTRLTVL | |
| | (X = any amino acid) | |
| β chain with WT signal | MGPGLLCWVLLCLLGAGPVDAGVTQSPTHLIKTRGQQVTLRCSPISGHKSVS | 2288 |
| peptide, Cβ | WYQQVLGQGPQFIFQYYEKEERGRGNFPDRFSARQFPNYSSELNVNALLLGD | |
| (substituted) | SALYLCASSGGRTSGAYEQFFGPGTRLTVLEDLRNVTPPKVSLFEPSKAEIA | |
| | NKQKATLVCLARGFFPDHVELSWWVNGKEVHSGVCTDPQAYKESNYSYCLSS | |
| | RLRVSATFWHNPRNHFRCQVQFHGLSEEDKWPEGSPKPVTQNISAEAWGRAD | |
| | CGITSASYQQGVLSATILYEILLGKATLYAVLVSTLVVMAMVKRKNS | |
| β chain with alternative | MAPGLLCWVLLCLLGAGPVDAGVTQSPTHLIKTRGQQVTLRCSPISGHKSVS | 2289 |
| signal peptide, Cβ | WYQQVLGQGPQFIFQYYEKEERGRGNFPDRFSARQFPNYSSELNVNALLLGD | |
| (substituted) | SALYLCASSGGRTSGAYEQFFGPGTRLTVLEDLRNVTPPKVSLFEPSKAEIA | |
| | NKQKATLVCLARGFFPDHVELSWWVNGKEVHSGVCTDPQAYKESNYSYCLSS | |
| | RLRVSATFWHNPRNHFRCQVQFHGLSEEDKWPEGSPKPVTQNISAEAWGRAD | |
| | CGITSASYQQGVLSATILYEILLGKATLYAVLVSTLVVMAMVKRKNS | |
| β chain with alternative | MHPGLLCWVLLCLLGAGPVDAGVTQSPTHLIKTRGQQVTLRCSPISGHKSVS | 2290 |
| signal peptide, Cβ | WYQQVLGQGPQFIFQYYEKEERGRGNFPDRFSARQFPNYSSELNVNALLLGD | |
| (substituted) | SALYLCASSGGRTSGAYEQFFGPGTRLTVLEDLRNVTPPKVSLFEPSKAEIA | |
| | NKQKATLVCLARGFFPDHVELSWWVNGKEVHSGVCTDPQAYKESNYSYCLSS | |
| | RLRVSATFWHNPRNHFRCQVQFHGLSEEDKWPEGSPKPVTQNISAEAWGRAD | |
| | CGITSASYQQGVLSATILYEILLGKATLYAVLVSTLVVMAMVKRKNS | |

[0193] In some embodiments, TCR029 interacts with and/or is specific for p53. In some embodiments, the peptide is from a neoantigen of p53. In some embodiments, the neoantigen has the amino acid change R248Q relative to the wild type p53 sequence. In some embodiments, TCR029 interacts with the neoantigen in the context of HLA-A*02:01, as described in International Publication No. WO 2019/067243, incorporated herein by reference in its entirety.

TABLE 6AD
Amino acid sequences of TCR030.

| | | SEQ |
|---|---|---|
| | | ID |
| Description | Sequence | NO: |
| CDR1α | VSGLRG | 1291 |
| CDR2α | LYSAGEE | 1292 |
| CDR3α | AVTAHRGSTLGRLY | 1293 |
| Vα without signal | EDQVTQSPEALRLQEGESSSLNCSYTVSGLRGLFWYRQDPGKGPEFLFTLYS | 1294 |
| peptide (SignalP) | AGEEKEKERLKATLTKKESFLHITAPKPEDSATYLCAVTAHRGSTLGRLYFG | |
| | RGTQLTVWP | |
| Vα without signal | EDQVTQSPEALRLQEGESSSLNCSYTVSGLRGLFWYRQDPGKGPEFLFTLYS | 1295 |
| peptide (IMGT) | AGEEKEKERLKATLTKKESFLHITAPKPEDSATYLCAVTAHRGSTLGRLYFG | |
| | RGTQLTVWP | |
| Vα | MXKMLECAFIVLWLQLGWLSGEDQVTQSPEALRLQEGESSSLNCSYTVSGLR | 1296 |
| | GLFWYRQDPGKGPEFLFTLYSAGEEKEKERLKATLTKKESFLHITAPKPEDS | 1297 |
| | ATYLCAVTAHRGSTLGRLYFGRGTQLTVWP | |
| | (X = any amino acid) | |
| α chain with WT signal | MEKMLECAFIVLWLQLGWLSGEDQVTQSPEALRLQEGESSSLNCSYTVSGLR | 1298 |
| peptide, Cα | GLFWYRQDPGKGPEFLFTLYSAGEEKEKERLKATLTKKESFLHITAPKPEDS | |
| (substituted) | ATYLCAVTAHRGSTLGRLYFGRGTQLTVWPNIQNPEPAVYQLKDPRSQDSTL | |
| | CLFTDFDSQINVPKTMESGTFITDKCVLDMKAMDSKSNGAIAWSNQTSFTCQ | |
| | DIFKETNATYPSSDVPCDATLTEKSFETDMNLNFQNLLVIVLRILLLKVAGF | |
| | NLLMTLRLWSS | |
| α chain with | MAKMLECAFIVLWLQLGWLSGEDQVTQSPEALRLQEGESSSLNCSYTVSGLR | 1299 |
| alternative signal | GLFWYRQDPGKGPEFLFTLYSAGEEKEKERLKATLTKKESFLHITAPKPEDS | |
| peptide, Cα | ATYLCAVTAHRGSTLGRLYFGRGTQLTVWPNIQNPEPAVYQLKDPRSQDSTL | |
| (substituted) | CLFTDFDSQINVPKTMESGTFITDKCVLDMKAMDSKSNGAIAWSNQTSFTCQ | |
| | DIFKETNATYPSSDVPCDATLTEKSFETDMNLNFQNLLVIVLRILLLKVAGF | |
| | NLLMTLRLWSS | |
| α chain with | MHKMLECAFIVLWLQLGWLSGEDQVTQSPEALRLQEGESSSLNCSYTVSGLR | 1300 |
| alternative signal | GLFWYRQDPGKGPEFLFTLYSAGEEKEKERLKATLTKKESFLHITAPKPEDS | |
| peptide, Cα | ATYLCAVTAHRGSTLGRLYFGRGTQLTVWPNIQNPEPAVYQLKDPRSQDSTL | |
| (substituted) | CLFTDFDSQINVPKTMESGTFITDKCVLDMKAMDSKSNGAIAWSNQTSFTCQ | |
| | DIFKETNATYPSSDVPCDATLTEKSFETDMNLNFQNLLVIVLRILLLKVAGF | |
| | NLLMTLRLWSS | |
| CDR1β | SGHDT | 2291 |
| CDR2β | YYEEEE | 2292 |
| CDR3β | ASSRRGGAYNEQF | 2293 |
| Vβ without signal | GVTQSPTHLIKTRGQQVTLRCSPKSGHDTVSWYQQALGQGPQFIFQYYEEEE | 2294 |
| peptide (SignalP) | RQRGNFPDRFSGHQFPNYSSELNVNALLLGDSALYLCASSRRGGAYNEQFFG | |
| | PGTRLTVL | |
| Vβ without signal | DAGVTQSPTHLIKTRGQQVTLRCSPKSGHDTVSWYQQALGQGPQFIFQYYEE | 2295 |
| peptide (IMGT) | EERQRGNFPDRFSGHQFPNYSSELNVNALLLGDSALYLCASSRRGGAYNEQF | |
| | FGPGTRLTVL | |
| Vβ | MXPGLLCWALLCLLGAGLVDAGVTQSPTHLIKTRGQQVTLRCSPKSGHDTVS | 2296 |
| | WYQQALGQGPQFIFQYYEEEERQRGNFPDRFSGHQFPNYSSELNVNALLLGD | 2297 |
| | SALYLCASSRRGGAYNEQFFGPGTRLTVL | |
| | (X = any amino acid) | |
| β chain with WT signal | MGPGLLCWALLCLLGAGLVDAGVTQSPTHLIKTRGQQVTLRCSPKSGHDTVS | 2298 |
| peptide, Cβ | WYQQALGQGPQFIFQYYEEEERQRGNFPDRFSGHQFPNYSSELNVNALLLGD | |
| (substituted) | SALYLCASSRRGGAYNEQFFGPGTRLTVLEDLRNVTPPKVSLFEPSKAEIAN | |
| | KQKATLVCLARGFFPDHVELSWWVNGKEVHSGVCTDPQAYKESNYSYCLSSR | |
| | LRVSATFWHNPRNHFRCQVQFHGLSEEDKWPEGSPKPVTQNISAEAWGRADC | |
| | GITSASYQQGVLSATILYEILLGKATLYAVLVSTLVVMAMVKRKNS | |
| β chain with alternative | MAPGLLCWALLCLLGAGLVDAGVTQSPTHLIKTRGQQVTLRCSPKSGHDTVS | 2299 |
| signal peptide, Cβ | WYQQALGQGPQFIFQYYEEEERQRGNFPDRFSGHQFPNYSSELNVNALLLGD | |
| (substituted) | SALYLCASSRRGGAYNEQFFGPGTRLTVLEDLRNVTPPKVSLFEPSKAEIAN | |
| | KQKATLVCLARGFFPDHVELSWWVNGKEVHSGVCTDPQAYKESNYSYCLSSR | |
| | LRVSATFWHNPRNHFRCQVQFHGLSEEDKWPEGSPKPVTQNISAEAWGRADC | |
| | GITSASYQQGVLSATILYEILLGKATLYAVLVSTLVVMAMVKRKNS | |
| β chain with alternative | MHPGLLCWALLCLLGAGLVDAGVTQSPTHLIKTRGQQVTLRCSPKSGHDTVS | 2300 |
| signal peptide, Cβ | WYQQALGQGPQFIFQYYEEEERQRGNFPDRFSGHQFPNYSSELNVNALLLGD | |
| (substituted) | SALYLCASSRRGGAYNEQFFGPGTRLTVLEDLRNVTPPKVSLFEPSKAEIAN | |
| | KQKATLVCLARGFFPDHVELSWWVNGKEVHSGVCTDPQAYKESNYSYCLSSR | |
| | LRVSATFWHNPRNHFRCQVQFHGLSEEDKWPEGSPKPVTQNISAEAWGRADC | |
| | GITSASYQQGVLSATILYEILLGKATLYAVLVSTLVVMAMVKRKNS | |

[0194] In some embodiments, TCR030 interacts with and/or is specific for p53. In some embodiments, the peptide is from a neoantigen of p53. In some embodiments, the neoantigen has the amino acid change R248Q relative to the wild type p53 sequence. In some embodiments, TCR030 interacts with the neoantigen in the context of HLA-A*02:01, as described in International Publication No. WO 2019/067243, incorporated herein by reference in its entirety.

TABLE 6AE
Amino acid sequences of TCR031.

| | | SEQ |
|---|---|---|
| | | ID |
| Description | Sequence | NO: |
| CDR1α | SSNFYA | 1301 |
| CDR2α | MTLNGDE | 1302 |
| CDR3α | ASVGGGADGLT | 1303 |
| Vα without signal | ILNVEQSPQSLHVQEGDSTNFTCSFPSSNFYALHWYRWETAKSPEALFVMTL | 1304 |
| peptide (SignalP) | NGDEKKKGRISATLNTKEGYSYLYIKGSQPEDSATYLCASVGGGADGLTFGK | |
| | GTHLIIQP | |
| Vα without signal | ILNVEQSPQSLHVQEGDSTNFTCSFPSSNFYALHWYRWETAKSPEALFVMTL | 1305 |
| peptide (IMGT) | NGDEKKKGRISATLNTKEGYSYLYIKGSQPEDSATYLCASVGGGADGLTFGK | |
| | GTHLIIQP | |
| Vα | MXKNPLAAPLLILWFHLDCVSSILNVEQSPQSLHVQEGDSTNFTCSFPSSNF | 1306 |
| | YALHWYRWETAKSPEALFVMTLNGDEKKKGRISATLNTKEGYSYLYIKGSQP | 1307 |
| | EDSATYLCASVGGGADGLTFGKGTHLIIQP | |
| | (X = any amino acid) | |
| α chain with WT signal | MEKNPLAAPLLILWFHLDCVSSILNVEQSPQSLHVQEGDSTNFTCSFPSSNF | 1308 |
| peptide, Cα | YALHWYRWETAKSPEALFVMTLNGDEKKKGRISATLNTKEGYSYLYIKGSQP | |
| (substituted) | EDSATYLCASVGGGADGLTFGKGTHLIIQPNIQNPEPAVYQLKDPRSQDSTL | |
| | CLFTDFDSQINVPKTMESGTFITDKCVLDMKAMDSKSNGAIAWSNQTSFTCQ | |
| | DIFKETNATYPSSDVPCDATLTEKSFETDMNLNFQNLLVIVLRILLLKVAGF | |
| | NLLMTLRLWSS | |
| α chain with | MAKNPLAAPLLILWFHLDCVSSILNVEQSPQSLHVQEGDSTNFTCSFPSSNF | 1309 |
| alternative signal | YALHWYRWETAKSPEALFVMTLNGDEKKKGRISATLNTKEGYSYLYIKGSQP | |
| peptide, Cα | EDSATYLCASVGGGADGLTFGKGTHLIIQPNIQNPEPAVYQLKDPRSQDSTL | |
| (substituted) | CLFTDFDSQINVPKTMESGTFITDKCVLDMKAMDSKSNGAIAWSNQTSFTCQ | |
| | DIFKETNATYPSSDVPCDATLTEKSFETDMNLNFQNLLVIVLRILLLKVAGF | |
| | NLLMTLRLWSS | |
| α chain with | MHKNPLAAPLLILWFHLDCVSSILNVEQSPQSLHVQEGDSTNFTCSFPSSNF | 1310 |
| alternative signal | YALHWYRWETAKSPEALFVMTLNGDEKKKGRISATLNTKEGYSYLYIKGSQP | |
| peptide, Cα | EDSATYLCASVGGGADGLTFGKGTHLIIQPNIQNPEPAVYQLKDPRSQDSTL | |
| (substituted) | CLFTDFDSQINVPKTMESGTFITDKCVLDMKAMDSKSNGAIAWSNQTSFTCQ | |
| | DIFKETNATYPSSDVPCDATLTEKSFETDMNLNFQNLLVIVLRILLLKVAGF | |
| | NLLMTLRLWSS | |
| CDR1β | SGHTA | 2301 |
| CDR2β | FQGNSA | 2302 |
| CDR3β | ASTWDRGSYNEQF | 2303 |
| Vβ without signal | GVSQSPSNKVTEKGKDVELRCDPISGHTALYWYRQSLGQGLEFLIYFQGNSA | 2304 |
| peptide (SignalP) | PDKSGLPSDRFSAERTGGSVSTLTIQRTQQEDSAVYLCASTWDRGSYNEQFF | |
| | GPGTRLTVL | |
| Vβ without signal | GAGVSQSPSNKVTEKGKDVELRCDPISGHTALYWYRQSLGQGLEFLIYFQGN | 2305 |
| peptide (IMGT) | SAPDKSGLPSDRFSAERTGGSVSTLTIQRTQQEDSAVYLCASTWDRGSYNEQ | |
| | FFGPGTRLTVL | |
| Vβ | MXTRLLFWVAFCLLGADHTGAGVSQSPSNKVTEKGKDVELRCDPISGHTALY | 2306 |
| | WYRQSLGQGLEFLIYFQGNSAPDKSGLPSDRFSAERTGGSVSTLTIQRTQQE | 2307 |
| | DSAVYLCASTWDRGSYNEQFFGPGTRLTVL | |
| | (X = any amino acid) | |
| β chain with WT signal | MGTRLLFWVAFCLLGADHTGAGVSQSPSNKVTEKGKDVELRCDPISGHTALY | 2308 |
| peptide, Cβ | WYRQSLGQGLEFLIYFQGNSAPDKSGLPSDRESAERTGGSVSTLTIQRTQQE | |
| (substituted) | DSAVYLCASTWDRGSYNEQFFGPGTRLTVLEDLRNVTPPKVSLFEPSKAEIA | |
| | NKQKATLVCLARGFFPDHVELSWWVNGKEVHSGVCTDPQAYKESNYSYCLSS | |
| | RLRVSATFWHNPRNHFRCQVQFHGLSEEDKWPEGSPKPVTQNISAEAWGRAD | |
| | CGITSASYQQGVLSATILYEILLGKATLYAVLVSTLVVMAMVKRKNS | |
| β chain with alternative | MATRLLFWVAFCLLGADHTGAGVSQSPSNKVTEKGKDVELRCDPISGHTALY | 2309 |
| signal peptide, Cβ | WYRQSLGQGLEFLIYFQGNSAPDKSGLPSDRESAERTGGSVSTLTIQRTQQE | |
| (substituted) | DSAVYLCASTWDRGSYNEQFFGPGTRLTVLEDLRNVTPPKVSLFEPSKAEIA | |
| | NKQKATLVCLARGFFPDHVELSWWVNGKEVHSGVCTDPQAYKESNYSYCLSS | |
| | RLRVSATFWHNPRNHFRCQVQFHGLSEEDKWPEGSPKPVTQNISAEAWGRAD | |
| | CGITSASYQQGVLSATILYEILLGKATLYAVLVSTLVVMAMVKRKNS | |
| β chain with alternative | MHTRLLFWVAFCLLGADHTGAGVSQSPSNKVTEKGKDVELRCDPISGHTALY | 2310 |
| signal peptide, Cβ | WYRQSLGQGLEFLIYFQGNSAPDKSGLPSDRFSAERTGGSVSTLTIQRTQQE | |
| (substituted) | DSAVYLCASTWDRGSYNEQFFGPGTRLTVLEDLRNVTPPKVSLFEPSKAEIA | |
| | NKQKATLVCLARGFFPDHVELSWWVNGKEVHSGVCTDPQAYKESNYSYCLSS | |
| | RLRVSATFWHNPRNHFRCQVQFHGLSEEDKWPEGSPKPVTQNISAEAWGRAD | |
| | CGITSASYQQGVLSATILYEILLGKATLYAVLVSTLVVMAMVKRKNS | |

[0195] In some embodiments, TCR031 interacts with and/or is specific for p53. In some embodiments, the peptide is from a neoantigen of p53. In some embodiments, the neoantigen has the amino acid change R248Q relative to the wild type p53 sequence. In some embodiments, TCR031 interacts with the neoantigen in the context of HLA-A*02:01, as described in International Publication No. WO 2019/067243, incorporated herein by reference in its entirety.

TABLE 6AF
Amino acid sequences of TCR032.

| | | SEQ |
|---|---|---|
| | | ID |
| Description | Sequence | NO: |
| CDR1α | NSMEDY | 1311 |
| CDR2α | ISSIKDK | 1312 |
| CDR3α | AANTGNQFY | 1313 |
| Vα without signal | QQKNDDQQVKQNSPSLSVQEGRISILNCDYTNSMFDYFLWYKKYPAEGPTFL | 1314 |
| peptide (SignalP) | ISISSIKDKNEDGRFTVFLNKSAKHLSLHIVPSQPGDSAVYFCAANTGNQFY | |
| | FGTGTSLTVIP | |
| Vα without signal | DQQVKQNSPSLSVQEGRISILNCDYTNSMFDYFLWYKKYPAEGPTFLISISS | 1315 |
| peptide (IMGT) | IKDKNEDGRFTVFLNKSAKHLSLHIVPSQPGDSAVYFCAANTGNQFYFGTGT | |
| | SLTVIP | |
| Vα | MXMLLGASVLILWLQPDWVNSQQKNDDQQVKQNSPSLSVQEGRISILNCDYT | 1316 |
| | NSMFDYFLWYKKYPAEGPTFLISISSIKDKNEDGRFTVFLNKSAKHLSLHIV | |
| | PSQPGDSAVYFCAANTGNQFYFGTGTSLTVIP | 1317 |
| | (X = any amino acid) | |
| α chain with WT signal | MAMLLGASVLILWLQPDWVNSQQKNDDQQVKQNSPSLSVQEGRISILNCDYT | 1318 |
| peptide, Cα | NSMFDYFLWYKKYPAEGPTFLISISSIKDKNEDGRFTVFLNKSAKHLSLHIV | 1319 |
| (substituted) | PSQPGDSAVYFCAANTGNQFYFGTGTSLTVIPNIQNPEPAVYQLKDPRSQDS | |
| | TLCLFTDFDSQINVPKTMESGTFITDKCVLDMKAMDSKSNGAIAWSNQTSFT | |
| | CQDIFKETNATYPSSDVPCDATLTEKSFETDMNLNFQNLLVIVLRILLLKVA | |
| | GFNLLMTLRLWSS | |
| α chain with | MHMLLGASVLILWLQPDWVNSQQKNDDQQVKQNSPSLSVQEGRISILNCDYT | 1320 |
| alternative signal | NSMFDYFLWYKKYPAEGPTFLISISSIKDKNEDGRFTVFLNKSAKHLSLHIV | |
| peptide, Cα | PSQPGDSAVYFCAANTGNQFYFGTGTSLTVIPNIQNPEPAVYQLKDPRSQDS | |
| (substituted) | TLCLFTDFDSQINVPKTMESGTFITDKCVLDMKAMDSKSNGAIAWSNQTSFT | |
| | CQDIFKETNATYPSSDVPCDATLTEKSFETDMNLNFQNLLVIVLRILLLKVA | |
| | GFNLLMTLRLWSS | |
| CDR1β | SGHAT | 2311 |
| CDR2β | FQNNGV | 2312 |
| CDR3β | ASSHLAGEFYNEQF | 2313 |
| Vβ without signal | GVAQSPRYKIIEKRQSVAFWCNPISGHATLYWYQQILGQGPKLLIQFQNNGV | 2314 |
| peptide (SignalP) | VDDSQLPKDRFSAERLKGVDSTLKIQPAKLEDSAVYLCASSHLAGEFYNEQF | |
| | FGPGTRLTVL | |
| Vβ without signal | EAGVAQSPRYKIIEKRQSVAFWCNPISGHATLYWYQQILGQGPKLLIQFQNN | 2315 |
| peptide (IMGT) | GVVDDSQLPKDRFSAERLKGVDSTLKIQPAKLEDSAVYLCASSHLAGEFYNE | |
| | QFFGPGTRLTVL | |
| Vβ | MXTRLLCWAALCLLGAELTEAGVAQSPRYKIIEKRQSVAFWCNPISGHATLY | 2316 |
| | WYQQILGQGPKLLIQFQNNGVVDDSQLPKDRFSAERLKGVDSTLKIQPAKLE | 2317 |
| | DSAVYLCASSHLAGEFYNEQFFGPGTRLTVL | |
| | (X = any amino acid) | |
| β chain with WT signal | MGTRLLCWAALCLLGAELTEAGVAQSPRYKIIEKRQSVAFWCNPISGHATLY | 2318 |
| peptide, Cβ | WYQQILGQGPKLLIQFQNNGVVDDSQLPKDRFSAERLKGVDSTLKIQPAKLE | |
| (substituted) | DSAVYLCASSHLAGEFYNEQFFGPGTRLTVLEDLRNVTPPKVSLFEPSKAEI | |
| | ANKQKATLVCLARGFFPDHVELSWWVNGKEVHSGVCTDPQAYKESNYSYCLS | |
| | SRLRVSATFWHNPRNHFRCQVQFHGLSEEDKWPEGSPKPVTQNISAEAWGRA | |
| | DCGITSASYQQGVLSATILYEILLGKATLYAVLVSTLVVMAMVKRKNS | |
| β chain with alternative | MATRLLCWAALCLLGAELTEAGVAQSPRYKIIEKRQSVAFWCNPISGHATLY | 2319 |
| signal peptide, Cβ | WYQQILGQGPKLLIQFQNNGVVDDSQLPKDRFSAERLKGVDSTLKIQPAKLE | |
| (substituted) | DSAVYLCASSHLAGEFYNEQFFGPGTRLTVLEDLRNVTPPKVSLFEPSKAEI | |
| | ANKQKATLVCLARGFFPDHVELSWWVNGKEVHSGVCTDPQAYKESNYSYCLS | |
| | SRLRVSATFWHNPRNHFRCQVQFHGLSEEDKWPEGSPKPVTQNISAEAWGRA | |
| | DCGITSASYQQGVLSATILYEILLGKATLYAVLVSTLVVMAMVKRKNS | |
| β chain with alternative | MHTRLLCWAALCLLGAELTEAGVAQSPRYKIIEKRQSVAFWCNPISGHATLY | 2320 |
| signal peptide, Cβ | WYQQILGQGPKLLIQFQNNGVVDDSQLPKDRFSAERLKGVDSTLKIQPAKLE | |
| (substituted) | DSAVYLCASSHLAGEFYNEQFFGPGTRLTVLEDLRNVTPPKVSLFEPSKAEI | |
| | ANKQKATLVCLARGFFPDHVELSWWVNGKEVHSGVCTDPQAYKESNYSYCLS | |
| | SRLRVSATFWHNPRNHFRCQVQFHGLSEEDKWPEGSPKPVTQNISAEAWGRA | |
| | DCGITSASYQQGVLSATILYEILLGKATLYAVLVSTLVVMAMVKRKNS | |

[0196] In some embodiments, TCR032 interacts with and/or is specific for p53. In some embodiments, the peptide is from a neoantigen of p53. In some embodiments, the neoantigen has the amino acid change R248Q relative to the wild type p53 sequence. In some embodiments, TCR032 interacts with the neoantigen in the context of HLA-A*02:01, as described in International Publication No. WO 2019/067243, incorporated herein by reference in its entirety.

TABLE 6AG
Amino acid sequences of TCR033.

| | | SEQ |
|---|---|---|
| | | ID |
| Description | Sequence | NO: |
| CDR1α | TSGFYG | 1321 |
| CDR2α | NALDGL | 1322 |
| CDR3α | AFAYGQNFV | 1323 |
| Vα without signal | QSLEQPSEVTAVEGAIVQINCTYQTSGFYGLSWYQQHDGGAPTFLSYNALDG | 1324 |
| peptide (SignalP) | LEETGRFSSFLSRSDSYGYLLLQELQMKDSASYFCAFAYGQNFVFGPGTRLS | |
| | VLP | |
| Vα without signal | GQSLEQPSEVTAVEGAIVQINCTYQTSGFYGLSWYQQHDGGAPTFLSYNALD | 1325 |
| peptide (IMGT) | GLEETGRFSSFLSRSDSYGYLLLQELQMKDSASYFCAFAYGQNFVFGPGTRL | |
| | SVLP | |
| Vα | MXGAFLLYVSMKMGGTAGQSLEQPSEVTAVEGAIVQINCTYQTSGFYGLSWY | 1326 |
| | QQHDGGAPTFLSYNALDGLEETGRFSSFLSRSDSYGYLLLQELQMKDSASYF | 1327 |
| | CAFAYGQNFVFGPGTRLSVLP | |
| | (X = any amino acid) | |
| α chain with WT signal | MWGAFLLYVSMKMGGTAGQSLEQPSEVTAVEGAIVQINCTYQTSGFYGLSWY | 1328 |
| peptide, Cα | QQHDGGAPTFLSYNALDGLEETGRFSSFLSRSDSYGYLLLQELQMKDSASYF | |
| (substituted) | CAFAYGQNFVFGPGTRLSVLPNIQNPEPAVYQLKDPRSQDSTLCLFTDFDSQ | |
| | INVPKTMESGTFITDKCVLDMKAMDSKSNGAIAWSNQTSFTCQDIFKETNAT | |
| | YPSSDVPCDATLTEKSFETDMNLNFQNLLVIVLRILLLKVAGFNLLMTLRLW | |
| | SS | |
| α chain with | MAGAFLLYVSMKMGGTAGQSLEQPSEVTAVEGAIVQINCTYQTSGFYGLSWY | 1329 |
| alternative signal | QQHDGGAPTFLSYNALDGLEETGRFSSFLSRSDSYGYLLLQELQMKDSASYF | |
| peptide, Cα | CAFAYGQNFVFGPGTRLSVLPNIQNPEPAVYQLKDPRSQDSTLCLFTDFDSQ | |
| (substituted) | INVPKTMESGTFITDKCVLDMKAMDSKSNGAIAWSNQTSFTCQDIFKETNAT | |
| | YPSSDVPCDATLTEKSFETDMNLNFQNLLVIVLRILLLKVAGFNLLMTLRLW | |
| | SS | |
| α chain with | MHGAFLLYVSMKMGGTAGQSLEQPSEVTAVEGAIVQINCTYQTSGFYGLSWY | 1330 |
| alternative signal | QQHDGGAPTFLSYNALDGLEETGRFSSFLSRSDSYGYLLLQELQMKDSASYF | |
| peptide, Cα | CAFAYGQNFVFGPGTRLSVLPNIQNPEPAVYQLKDPRSQDSTLCLFTDFDSQ | |
| (substituted) | INVPKTMESGTFITDKCVLDMKAMDSKSNGAIAWSNQTSFTCQDIFKETNAT | |
| | YPSSDVPCDATLTEKSFETDMNLNFQNLLVIVLRILLLKVAGFNLLMTLRLW | |
| | SS | |
| CDR1β | SGDLS | 2321 |
| CDR2β | YYNGEE | 2322 |
| CDR3β | ASSPLGDSGNTIY | 2323 |
| Vβ without signal | GVTQTPKHLITATGQRVTLRCSPRSGDLSVYWYQQSLDQGLQFLIQYYNGEE | 2324 |
| peptide (SignalP) | RAKGNILERFSAQQFPDLHSELNLSSLELGDSALYFCASSPLGDSGNTIYFG | |
| | EGSWLTVV | |
| Vβ without signal | DSGVTQTPKHLITATGQRVTLRCSPRSGDLSVYWYQQSLDQGLQFLIQYYNG | 2325 |
| peptide (IMGT) | EERAKGNILERFSAQQFPDLHSELNLSSLELGDSALYFCASSPLGDSGNTIY | |
| | FGEGSWLTVV | |
| Vβ | MXFRLLCCVAFCLLGAGPVDSGVTQTPKHLITATGQRVTLRCSPRSGDLSVY | 2326 |
| | WYQQSLDQGLQFLIQYYNGEERAKGNILERFSAQQFPDLHSELNLSSLELGD | 2327 |
| | SALYFCASSPLGDSGNTIYFGEGSWLTVV | |
| | (X = any amino acid) | |
| β chain with WT signal | MGFRLLCCVAFCLLGAGPVDSGVTQTPKHLITATGQRVTLRCSPRSGDLSVY | 2328 |
| peptide, Cβ | WYQQSLDQGLQFLIQYYNGEERAKGNILERFSAQQFPDLHSELNLSSLELGD | |
| (substituted) | SALYFCASSPLGDSGNTIYFGEGSWLTVVEDLRNVTPPKVSLFEPSKAEIAN | |
| | KQKATLVCLARGFFPDHVELSWWVNGKEVHSGVCTDPQAYKESNYSYCLSSR | |
| | LRVSATFWHNPRNHFRCQVQFHGLSEEDKWPEGSPKPVTQNISAEAWGRADC | |
| | GITSASYQQGVLSATILYEILLGKATLYAVLVSTLVVMAMVKRKNS | |
| β chain with alternative | MAFRLLCCVAFCLLGAGPVDSGVTQTPKHLITATGQRVTLRCSPRSGDLSVY | 2329 |
| signal peptide, Cβ | WYQQSLDQGLQFLIQYYNGEERAKGNILERFSAQQFPDLHSELNLSSLELGD | |
| (substituted) | SALYFCASSPLGDSGNTIYFGEGSWLTVVEDLRNVTPPKVSLFEPSKAEIAN | |
| | KQKATLVCLARGFFPDHVELSWWVNGKEVHSGVCTDPQAYKESNYSYCLSSR | |
| | LRVSATFWHNPRNHFRCQVQFHGLSEEDKWPEGSPKPVTQNISAEAWGRADC | |
| | GITSASYQQGVLSATILYEILLGKATLYAVLVSTLVVMAMVKRKNS | |
| β chain with alternative | MHFRLLCCVAFCLLGAGPVDSGVTQTPKHLITATGQRVTLRCSPRSGDLSVY | 2330 |
| signal peptide, Cβ | WYQQSLDQGLQFLIQYYNGEERAKGNILERFSAQQFPDLHSELNLSSLELGD | |
| (substituted) | SALYFCASSPLGDSGNTIYFGEGSWLTVVEDLRNVTPPKVSLFEPSKAEIAN | |
| | KQKATLVCLARGFFPDHVELSWWVNGKEVHSGVCTDPQAYKESNYSYCLSSR | |
| | LRVSATFWHNPRNHFRCQVQFHGLSEEDKWPEGSPKPVTQNISAEAWGRADC | |
| | GITSASYQQGVLSATILYEILLGKATLYAVLVSTLVVMAMVKRKNS | |

[0197] In some embodiments, TCR034 interacts with and/or is specific for p53. In some embodiments, the peptide is from a neoantigen of p53. In some embodiments, the neoantigen has the amino acid change R248Q relative to the wild type p53 sequence. In some embodiments, TCR034 interacts with the neoantigen in the context of HLA-A*02:01, as described in International Publication No. WO 2019/067243, incorporated herein by reference in its entirety.

TABLE 6AH
Amino acid sequences of TCR034.

| | | SEQ |
|---|---|---|
| | | ID |
| Description | Sequence | NO: |
| CDR1α | TSINN | 1331 |
| CDR2α | IRSNERE | 1332 |
| CDR3α | ATDAWNNDMR | 1333 |
| Vα without signal | QQGEEDPQALSIQEGENATMNCSYKTSINNLQWYRQNSGRGLVHLILIRSNE | 1334 |
| peptide (SignalP) | REKHSGRLRVTLDTSKKSSSLLITASRAADTASYFCATDAWNNDMRFGAGTR | |
| | LTVKP | |
| Vα without signal | SQQGEEDPQALSIQEGENATMNCSYKTSINNLQWYRQNSGRGLVHLILIRSN | 1335 |
| peptide (IMGT) | EREKHSGRLRVTLDTSKKSSSLLITASRAADTASYFCATDAWNNDMRFGAGT | |
| | RLTVKP | |
| Vα | MXTLLGVSLVILWLQLARVNSQQGEEDPQALSIQEGENATMNCSYKTSINNL | 1336 |
| | QWYRQNSGRGLVHLILIRSNEREKHSGRLRVTLDTSKKSSSLLITASRAADT | 1337 |
| | ASYFCATDAWNNDMRFGAGTRLTVKP | |
| | (X = any amino acid) | |
| α chain with WT signal | METLLGVSLVILWLQLARVNSQQGEEDPQALSIQEGENATMNCSYKTSINNL | 1338 |
| peptide, Cα | QWYRQNSGRGLVHLILIRSNEREKHSGRLRVTLDTSKKSSSLLITASRAADT | |
| (substituted) | ASYFCATDAWNNDMRFGAGTRLTVKPNIQNPEPAVYQLKDPRSQDSTLCLFT | |
| | DFDSQINVPKTMESGTFITDKCVLDMKAMDSKSNGAIAWSNQTSFTCQDIFK | |
| | ETNATYPSSDVPCDATLTEKSFETDMNLNFQNLLVIVLRILLLKVAGFNLLM | |
| | TLRLWSS | |
| α chain with | MATLLGVSLVILWLQLARVNSQQGEEDPQALSIQEGENATMNCSYKTSINNL | 1339 |
| alternative signal | QWYRQNSGRGLVHLILIRSNEREKHSGRLRVTLDTSKKSSSLLITASRAADT | |
| peptide, Cα | ASYFCATDAWNNDMRFGAGTRLTVKPNIQNPEPAVYQLKDPRSQDSTLCLFT | |
| (substituted) | DFDSQINVPKTMESGTFITDKCVLDMKAMDSKSNGAIAWSNQTSFTCQDIFK | |
| | ETNATYPSSDVPCDATLTEKSFETDMNLNFQNLLVIVLRILLLKVAGFNLLM | |
| | TLRLWSS | |
| α chain with | MHTLLGVSLVILWLQLARVNSQQGEEDPQALSIQEGENATMNCSYKTSINNL | 1340 |
| alternative signal | QWYRQNSGRGLVHLILIRSNEREKHSGRLRVTLDTSKKSSSLLITASRAADT | |
| peptide, Cα | ASYFCATDAWNNDMRFGAGTRLTVKPNIQNPEPAVYQLKDPRSQDSTLCLFT | |
| (substituted) | DFDSQINVPKTMESGTFITDKCVLDMKAMDSKSNGAIAWSNQTSFTCQDIFK | |
| | ETNATYPSSDVPCDATLTEKSFETDMNLNFQNLLVIVLRILLLKVAGFNLLM | |
| | TLRLWSS | |
| CDR1β | MNHNS | 2331 |
| CDR2β | SASEG | 2332 |
| CDR3β | ASSESQGNTEAF | 2333 |
| Vβ without signal | GVTQTPKFQVLKTGQSMTLQCAQDMNHNSMYWYRQDPGMGLRLIYYSASEGT | 2334 |
| peptide (SignalP) | TDKGEVPNGYNVSRLNKREFSLRLESAAPSQTSVYFCASSESQGNTEAFFGQ | |
| | GTRLTVV | |
| Vβ without signal | NAGVTQTPKFQVLKTGQSMTLQCAQDMNHNSMYWYRQDPGMGLRLIYYSASE | 2335 |
| peptide (IMGT) | GTTDKGEVPNGYNVSRLNKREFSLRLESAAPSQTSVYFCASSESQGNTEAFF | |
| | GQGTRLTVV | |
| Vβ | MXIGLLCCVAFSLLWASPVNAGVTQTPKFQVLKTGQSMTLQCAQDMNHNSMY | 2336 |
| | WYRQDPGMGLRLIYYSASEGTTDKGEVPNGYNVSRLNKREFSLRLESAAPSQ | 2337 |
| | TSVYFCASSESQGNTEAFFGQGTRLTVV | |
| | (X = any amino acid) | |
| β chain with WT signal | MSIGLLCCVAFSLLWASPVNAGVTQTPKFQVLKTGQSMTLQCAQDMNHNSMY | 2338 |
| peptide, Cβ | WYRQDPGMGLRLIYYSASEGTTDKGEVPNGYNVSRLNKREFSLRLESAAPSQ | |
| (substituted) | TSVYFCASSESQGNTEAFFGQGTRLTVVEDLRNVTPPKVSLFEPSKAEIANK | |
| | QKATLVCLARGFFPDHVELSWWVNGKEVHSGVCTDPQAYKESNYSYCLSSRL | |
| | RVSATFWHNPRNHFRCQVQFHGLSEEDKWPEGSPKPVTQNISAEAWGRADCG | |
| | ITSASYQQGVLSATILYEILLGKATLYAVLVSTLVVMAMVKRKNS | |
| β chain with alternative | MAIGLLCCVAFSLLWASPVNAGVTQTPKFQVLKTGQSMTLQCAQDMNHNSMY | 2339 |
| signal peptide, Cβ | WYRQDPGMGLRLIYYSASEGTTDKGEVPNGYNVSRLNKREFSLRLESAAPSQ | |
| (substituted) | TSVYFCASSESQGNTEAFFGQGTRLTVVEDLRNVTPPKVSLFEPSKAEIANK | |
| | QKATLVCLARGFFPDHVELSWWVNGKEVHSGVCTDPQAYKESNYSYCLSSRL | |
| | RVSATFWHNPRNHFRCQVQFHGLSEEDKWPEGSPKPVTQNISAEAWGRADCG | |
| | ITSASYQQGVLSATILYEILLGKATLYAVLVSTLVVMAMVKRKNS | |
| β chain with WT signal | MHIGLLCCVAFSLLWASPVNAGVTQTPKFQVLKTGQSMTLQCAQDMNHNSMY | 2340 |
| peptide, Cβ | WYRQDPGMGLRLIYYSASEGTTDKGEVPNGYNVSRLNKREFSLRLESAAPSQ | |
| (substituted) | TSVYFCASSESQGNTEAFFGQGTRLTVVEDLRNVTPPKVSLFEPSKAEIANK | |
| | QKATLVCLARGFFPDHVELSWWVNGKEVHSGVCTDPQAYKESNYSYCLSSRL | |
| | RVSATFWHNPRNHFRCQVQFHGLSEEDKWPEGSPKPVTQNISAEAWGRADCG | |
| | ITSASYQQGVLSATILYEILLGKATLYAVLVSTLVVMAMVKRKNS | |

[0198] In some embodiments, TCR034 interacts with and/or is specific for p53. In some embodiments, the peptide is from a neoantigen of p53. In some embodiments, the neoantigen has the amino acid change R248Q relative to the wild type p53 sequence. In some embodiments, TCR034 interacts with the neoantigen in the context of HLA-A*02:01, as described in International Publication No. WO 2019/067243, incorporated herein by reference in its entirety.

TABLE 6AI
Amino acid sequences of TCR035.

| | | SEQ |
|---|---|---|
| | | ID |
| Description | Sequence | NO: |
| CDR1α | VSPFSN | 1341 |
| CDR2α | MTFSENT | 1342 |
| CDR3α | VVSSYKII | 1343 |
| Vα without signal | KNQVEQSPQSLIILEGKNCTLQCNYTVSPFSNLRWYKQDTGRGPVSLTIMTF | 1344 |
| peptide (SignalP) | SENTKSNGRYTATLDADTKQSSLHITASQLSDSASYICVVSSYKIIFGTGTR | |
| | LHVFP | |
| Vα without signal | KNQVEQSPQSLIILEGKNCTLQCNYTVSPFSNLRWYKQDTGRGPVSLTIMTF | 1345 |
| peptide (IMGT) | SENTKSNGRYTATLDADTKQSSLHITASQLSDSASYICVVSSYKIIFGTGTR | |
| | LHVFP | |
| Vα | MXKHLTTFLVILWLYFYRGNGKNQVEQSPQSLIILEGKNCTLQCNYTVSPFS | 1346 |
| | NLRWYKQDTGRGPVSLTIMTFSENTKSNGRYTATLDADTKQSSLHITASQLS | 1347 |
| | DSASYICVVSSYKIIFGTGTRLHVFP | |
| | (X = any amino acid) | |
| α chain with WT signal | MKKHLTTFLVILWLYFYRGNGKNQVEQSPQSLIILEGKNCTLQCNYTVSPFS | 1348 |
| peptide, Cα | NLRWYKQDTGRGPVSLTIMTFSENTKSNGRYTATLDADTKQSSLHITASQLS | |
| (substituted) | DSASYICVVSSYKIIFGTGTRLHVFPNIQNPEPAVYQLKDPRSQDSTLCLFT | |
| | DFDSQINVPKTMESGTFITDKCVLDMKAMDSKSNGAIAWSNQTSFTCQDIFK | |
| | ETNATYPSSDVPCDATLTEKSFETDMNLNFQNLLVIVLRILLLKVAGFNLLM | |
| | TLRLWSS | |
| α chain with | MAKHLTTFLVILWLYFYRGNGKNQVEQSPQSLIILEGKNCTLQCNYTVSPFS | 1349 |
| alternative signal | NLRWYKQDTGRGPVSLTIMTFSENTKSNGRYTATLDADTKQSSLHITASQLS | |
| peptide, Cα | DSASYICVVSSYKIIFGTGTRLHVFPNIQNPEPAVYQLKDPRSQDSTLCLFT | |
| (substituted) | DFDSQINVPKTMESGTFITDKCVLDMKAMDSKSNGAIAWSNQTSFTCQDIFK | |
| | ETNATYPSSDVPCDATLTEKSFETDMNLNFQNLLVIVLRILLLKVAGFNLLM | |
| | TLRLWSS | |
| α chain with | MHKHLTTFLVILWLYFYRGNGKNQVEQSPQSLIILEGKNCTLQCNYTVSPFS | 1350 |
| alternative signal | NLRWYKQDTGRGPVSLTIMTFSENTKSNGRYTATLDADTKQSSLHITASQLS | |
| peptide, Cα | DSASYICVVSSYKIIFGTGTRLHVFPNIQNPEPAVYQLKDPRSQDSTLCLFT | |
| (substituted) | DFDSQINVPKTMESGTFITDKCVLDMKAMDSKSNGAIAWSNQTSFTCQDIFK | |
| | ETNATYPSSDVPCDATLTEKSFETDMNLNFQNLLVIVLRILLLKVAGFNLLM | |
| | TLRLWSS | |
| CDR1β | SGHTA | 2341 |
| CDR2β | FQGNSA | 2342 |
| CDR3β | ASSPIQGENSPLH | 2343 |
| Vβ without signal | GVSQSPSNKVTEKGKDVELRCDPISGHTALYWYRQRLGQGLEFLIYFQGNSA | 2344 |
| peptide (SignalP) | PDKSGLPSDRFSAERTGESVSTLTIQRTQQEDSAVYLCASSPIQGENSPLHF | |
| | GNGTRLTVT | |
| Vβ without signal | GAGVSQSPSNKVTEKGKDVELRCDPISGHTALYWYRQRLGQGLEFLIYFQGN | 2345 |
| peptide (IMGT) | SAPDKSGLPSDRESAERTGESVSTLTIQRTQQEDSAVYLCASSPIQGENSPL | |
| | HFGNGTRLTVT | |
| Vβ | MXTRLLFWVAFCLLGAYHTGAGVSQSPSNKVTEKGKDVELRCDPISGHTALY | 2346 |
| | WYRQRLGQGLEFLIYFQGNSAPDKSGLPSDRESAERTGESVSTLTIQRTQQE | 2347 |
| | DSAVYLCASSPIQGENSPLHFGNGTRLTVT | |
| | (X = any amino acid) | |
| β chain with WT signal | MGTRLLFWVAFCLLGAYHTGAGVSQSPSNKVTEKGKDVELRCDPISGHTALY | 2348 |
| peptide, Cβ | WYRQRLGQGLEFLIYFQGNSAPDKSGLPSDRFSAERTGESVSTLTIQRTQQE | |
| (substituted) | DSAVYLCASSPIQGENSPLHFGNGTRLTVTEDLRNVTPPKVSLFEPSKAEIA | |
| | NKQKATLVCLARGFFPDHVELSWWVNGKEVHSGVCTDPQAYKESNYSYCLSS | |
| | RLRVSATFWHNPRNHFRCQVQFHGLSEEDKWPEGSPKPVTQNISAEAWGRAD | |
| | CGITSASYQQGVLSATILYEILLGKATLYAVLVSTLVVMAMVKRKNS | |
| β chain with alternative | MATRLLFWVAFCLLGAYHTGAGVSQSPSNKVTEKGKDVELRCDPISGHTALY | 2349 |
| signal peptide, Cβ | WYRQRLGQGLEFLIYFQGNSAPDKSGLPSDRFSAERTGESVSTLTIQRTQQE | |
| (substituted) | DSAVYLCASSPIQGENSPLHFGNGTRLTVTEDLRNVTPPKVSLFEPSKAEIA | |
| | NKQKATLVCLARGFFPDHVELSWWVNGKEVHSGVCTDPQAYKESNYSYCLSS | |
| | RLRVSATFWHNPRNHFRCQVQFHGLSEEDKWPEGSPKPVTQNISAEAWGRAD | |
| | CGITSASYQQGVLSATILYEILLGKATLYAVLVSTLVVMAMVKRKNS | |
| β chain with alternative | MHTRLLFWVAFCLLGAYHTGAGVSQSPSNKVTEKGKDVELRCDPISGHTALY | 2350 |
| signal peptide, Cβ | WYRQRLGQGLEFLIYFQGNSAPDKSGLPSDRFSAERTGESVSTLTIQRTQQE | |
| (substituted) | DSAVYLCASSPIQGENSPLHFGNGTRLTVTEDLRNVTPPKVSLFEPSKAEIA | |
| | NKQKATLVCLARGFFPDHVELSWWVNGKEVHSGVCTDPQAYKESNYSYCLSS | |
| | RLRVSATFWHNPRNHFRCQVQFHGLSEEDKWPEGSPKPVTQNISAEAWGRAD | |
| | CGITSASYQQGVLSATILYEILLGKATLYAVLVSTLVVMAMVKRKNS | |

[0199] In some embodiments, TCR035 interacts with and/or is specific for p53. In some embodiments, the peptide is from a neoantigen of p53. In some embodiments, the neoantigen has the amino acid change R248Q relative to the wild type p53 sequence. In some embodiments, TCR035 interacts with the neoantigen in the context of HLA-A*02:01, as described in International Publication No. WO 2019/067243, incorporated herein by reference in its entirety.

TABLE 6AJ
Amino acid sequences of TCR036.

| | | SEQ |
|---|---|---|
| | | ID |
| Description | Sequence | NO: |
| CDR1α | VSPFSN | 1351 |
| CDR2α | MTFSENT | 1352 |
| CDR3α | VVSSYKLI | 1353 |
| Vα without signal | KNQVEQSPQSLIILEGKNCTLQCNYTVSPFSNLRWYKQDTGRGPVSLTIMTF | 1354 |
| peptide (SignalP) | SENTKSNGRYTATLDADTKQSSLHITASQLSDSASYICVVSSYKLIFGTGTR | |
| | LQVFP | |
| Vα without signal | KNQVEQSPQSLIILEGKNCTLQCNYTVSPFSNLRWYKQDTGRGPVSLTIMTE | 1355 |
| peptide (IMGT) | SENTKSNGRYTATLDADTKQSSLHITASQLSDSASYICVVSSYKLIFGTGTR | |
| | LQVFP | |
| Vα | MXKHLTTFLVILWLYFYRGNGKNQVEQSPQSLIILEGKNCTLQCNYTVSPFS | 1356 |
| | NLRWYKQDTGRGPVSLTIMTFSENTKSNGRYTATLDADTKQSSLHITASQLS | 1357 |
| | DSASYICVVSSYKLIFGTGTRLQVFP | |
| | (X = any amino acid) | |
| α chain with WT signal | MKKHLTTFLVILWLYFYRGNGKNQVEQSPQSLIILEGKNCTLQCNYTVSPFS | 1358 |
| peptide, Cα | NLRWYKQDTGRGPVSLTIMTFSENTKSNGRYTATLDADTKQSSLHITASQLS | |
| (substituted) | DSASYICVVSSYKLIFGTGTRLQVFPNIQNPEPAVYQLKDPRSQDSTLCLFT | |
| | DFDSQINVPKTMESGTFITDKCVLDMKAMDSKSNGAIAWSNQTSFTCQDIFK | |
| | ETNATYPSSDVPCDATLTEKSFETDMNLNFQNLLVIVLRILLLKVAGFNLLM | |
| | TLRLWSS | |
| α chain with | MAKHLTTFLVILWLYFYRGNGKNQVEQSPQSLIILEGKNCTLQCNYTVSPFS | 1359 |
| alternative signal | NLRWYKQDTGRGPVSLTIMTFSENTKSNGRYTATLDADTKQSSLHITASQLS | |
| peptide, Cα | DSASYICVVSSYKLIFGTGTRLQVFPNIQNPEPAVYQLKDPRSQDSTLCLFT | |
| (substituted) | DFDSQINVPKTMESGTFITDKCVLDMKAMDSKSNGAIAWSNQTSFTCQDIFK | |
| | ETNATYPSSDVPCDATLTEKSFETDMNLNFQNLLVIVLRILLLKVAGFNLLM | |
| | TLRLWSS | |
| α chain with | MHKHLTTFLVILWLYFYRGNGKNQVEQSPQSLIILEGKNCTLQCNYTVSPFS | 1360 |
| alternative signal | NLRWYKQDTGRGPVSLTIMTFSENTKSNGRYTATLDADTKQSSLHITASQLS | |
| peptide, Cα | DSASYICVVSSYKLIFGTGTRLQVFPNIQNPEPAVYQLKDPRSQDSTLCLFT | |
| (substituted) | DFDSQINVPKTMESGTFITDKCVLDMKAMDSKSNGAIAWSNQTSFTCQDIFK | |
| | ETNATYPSSDVPCDATLTEKSFETDMNLNFQNLLVIVLRILLLKVAGFNLLM | |
| | TLRLWSS | |
| CDR1β | SGHTA | 2351 |
| CDR2β | FQGNSA | 2352 |
| CDR3β | ASSPIQGENSPLH | 2353 |
| Vβ without signal | GVSQSPSNKVTEKGKDVELRCDPISGHTALYWYRQRLGQGLEFLIYFQGNSA | 2354 |
| peptide (SignalP) | PDKSGLPSDRFSAERTGESVSTLTIQRTQQEDSAVYLCASSPIQGENSPLHF | |
| | GNGTRLTVT | |
| Vβ without signal | GAGVSQSPSNKVTEKGKDVELRCDPISGHTALYWYRQRLGQGLEFLIYFQGN | 2355 |
| peptide (IMGT) | SAPDKSGLPSDRESAERTGESVSTLTIQRTQQEDSAVYLCASSPIQGENSPL | |
| | HFGNGTRLTVT | |
| Vβ | MXTRLLFWVAFCLLGAYHTGAGVSQSPSNKVTEKGKDVELRCDPISGHTALY | 2356 |
| | WYRQRLGQGLEFLIYFQGNSAPDKSGLPSDRFSAERTGESVSTLTIQRTQQE | 2357 |
| | DSAVYLCASSPIQGENSPLHFGNGTRLTVT | |
| | (X = any amino acid) | |
| β chain with WT signal | MGTRLLFWVAFCLLGAYHTGAGVSQSPSNKVTEKGKDVELRCDPISGHTALY | 2358 |
| peptide, Cβ | WYRQRLGQGLEFLIYFQGNSAPDKSGLPSDRFSAERTGESVSTLTIQRTQQE | |
| (substituted) | DSAVYLCASSPIQGENSPLHFGNGTRLTVTEDLRNVTPPKVSLFEPSKAEIA | |
| | NKQKATLVCLARGFFPDHVELSWWVNGKEVHSGVCTDPQAYKESNYSYCLSS | |
| | RLRVSATFWHNPRNHFRCQVQFHGLSEEDKWPEGSPKPVTQNISAEAWGRAD | |
| | CGITSASYQQGVLSATILYEILLGKATLYAVLVSTLVVMAMVKRKNS | |
| β chain with alternative | MATRLLFWVAFCLLGAYHTGAGVSQSPSNKVTEKGKDVELRCDPISGHTALY | 2359 |
| signal peptide, Cβ | WYRQRLGQGLEFLIYFQGNSAPDKSGLPSDRFSAERTGESVSTLTIQRTQQE | |
| (substituted) | DSAVYLCASSPIQGENSPLHFGNGTRLTVTEDLRNVTPPKVSLFEPSKAEIA | |
| | NKQKATLVCLARGFFPDHVELSWWVNGKEVHSGVCTDPQAYKESNYSYCLSS | |
| | RLRVSATFWHNPRNHFRCQVQFHGLSEEDKWPEGSPKPVTQNISAEAWGRAD | |
| | CGITSASYQQGVLSATILYEILLGKATLYAVLVSTLVVMAMVKRKNS | |
| β chain with alternative | MHTRLLFWVAFCLLGAYHTGAGVSQSPSNKVTEKGKDVELRCDPISGHTALY | 2360 |
| signal peptide, Cβ | WYRQRLGQGLEFLIYFQGNSAPDKSGLPSDRFSAERTGESVSTLTIQRTQQE | |
| (substituted) | DSAVYLCASSPIQGENSPLHFGNGTRLTVTEDLRNVTPPKVSLFEPSKAEIA | |
| | NKQKATLVCLARGFFPDHVELSWWVNGKEVHSGVCTDPQAYKESNYSYCLSS | |
| | RLRVSATFWHNPRNHFRCQVQFHGLSEEDKWPEGSPKPVTQNISAEAWGRAD | |
| | CGITSASYQQGVLSATILYEILLGKATLYAVLVSTLVVMAMVKRKNS | |

[0200] In some embodiments, TCR036 interacts with and/or is specific for p53. In some embodiments, the peptide is from a neoantigen of p53. In some embodiments, the neoantigen has the amino acid change R248Q relative to the wild type p53 sequence. In some embodiments, TCR036 interacts with the neoantigen in the context of HLA-A*02:01, as described in International Publication No. WO 2019/067243, incorporated herein by reference in its entirety.

TABLE 6AK
Amino acid sequences of TCR037.

| | | SEQ |
|---|---|---|
| | | ID |
| Description | Sequence | NO: |
| CDR1α | SSVSVY | 1361 |
| CDR2α | YLSGSTLV | 1362 |
| CDR3α | AVSKGTGAQKLV | 1363 |
| Vα without signal | QSVTQLDSQVPVFEEAPVELRCNYSSSVSVYLFWYVQYPNQGLQLLLKYLSG | 1364 |
| peptide (SignalP) | STLVESINGFEAEFNKSQTSFHLRKPSVHISDTAEYFCAVSKGTGAQKLVFG | |
| | QGTRLTINP | |
| Vα without signal | AQSVTQLDSQVPVFEEAPVELRCNYSSSVSVYLFWYVQYPNQGLQLLLKYLS | 1365 |
| peptide (IMGT) | GSTLVESINGFEAEFNKSQTSFHLRKPSVHISDTAEYFCAVSKGTGAQKLVF | |
| | GQGTRLTINP | |
| Vα | MXLLLVPAFQVIFTLGGTRAQSVTQLDSQVPVFEEAPVELRCNYSSSVSVYL | 1366 |
| | FWYVQYPNQGLQLLLKYLSGSTLVESINGFEAEFNKSQTSFHLRKPSVHISD | |
| | TAEYFCAVSKGTGAQKLVFGQGTRLTINP | 1367 |
| | (X = any amino acid) | |
| α chain with WT signal | MLLLLVPAFQVIFTLGGTRAQSVTQLDSQVPVFEEAPVELRCNYSSSVSVYL | 1368 |
| peptide, Cα | FWYVQYPNQGLQLLLKYLSGSTLVESINGFEAEFNKSQTSFHLRKPSVHISD | |
| (substituted) | TAEYFCAVSKGTGAQKLVFGQGTRLTINPNIQNPEPAVYQLKDPRSQDSTLC | |
| | LFTDFDSQINVPKTMESGTFITDKCVLDMKAMDSKSNGAIAWSNQTSFTCQD | |
| | IFKETNATYPSSDVPCDATLTEKSFETDMNLNFQNLLVIVLRILLLKVAGFN | |
| | LLMTLRLWSS | |
| α chain with | MALLLVPAFQVIFTLGGTRAQSVTQLDSQVPVFEEAPVELRCNYSSSVSVYL | 1369 |
| alternative signal | FWYVQYPNQGLQLLLKYLSGSTLVESINGFEAEFNKSQTSFHLRKPSVHISD | |
| peptide, Cα | TAEYFCAVSKGTGAQKLVFGQGTRLTINPNIQNPEPAVYQLKDPRSQDSTLC | |
| (substituted) | LFTDFDSQINVPKTMESGTFITDKCVLDMKAMDSKSNGAIAWSNQTSFTCQD | |
| | IFKETNATYPSSDVPCDATLTEKSFETDMNLNFQNLLVIVLRILLLKVAGFN | |
| | LLMTLRLWSS | |
| α chain with | MHLLLVPAFQVIFTLGGTRAQSVTQLDSQVPVFEEAPVELRCNYSSSVSVYL | 1370 |
| alternative signal | FWYVQYPNQGLQLLLKYLSGSTLVESINGFEAEFNKSQTSFHLRKPSVHISD | |
| peptide, Cα | TAEYFCAVSKGTGAQKLVFGQGTRLTINPNIQNPEPAVYQLKDPRSQDSTLC | |
| (substituted) | LFTDFDSQINVPKTMESGTFITDKCVLDMKAMDSKSNGAIAWSNQTSFTCQD | |
| | IFKETNATYPSSDVPCDATLTEKSFETDMNLNFQNLLVIVLRILLLKVAGFN | |
| | LLMTLRLWSS | |
| CDR1β | LNHDA | 2361 |
| CDR2β | SQIVND | 2362 |
| CDR3β | ASEAF | 2363 |
| Vβ without signal | GITQSPKYLFRKEGQNVTLSCEQNLNHDAMYWYRQDPGQGLRLIYYSQIVND | 2364 |
| peptide (SignalP) | FQKGDIAEGYSVSREKKESFPLIVTSAQKNPTASYLCASEAFFGQGTRLTVV | |
| Vβ without signal | DGGITQSPKYLFRKEGQNVTLSCEQNLNHDAMYWYRQDPGQGLRLIYYSQIV | 2365 |
| peptide (IMGT) | NDFQKGDIAEGYSVSREKKESFPLIVTSAQKNPTASYLCASEAFFGQGTRLT | |
| | VV | |
| Vβ | MXNQVLCCVVLCFLGANTVDGGITQSPKYLFRKEGQNVTLSCEQNLNHDAMY | 2366 |
| | WYRQDPGQGLRLIYYSQIVNDFQKGDIAEGYSVSREKKESFPLIVTSAQKNP | 2367 |
| | TASYLCASEAFFGQGTRLTVV | |
| | (X = any amino acid) | |
| β chain with WT signal | MSNQVLCCVVLCFLGANTVDGGITQSPKYLFRKEGQNVTLSCEQNLNHDAMY | 2368 |
| peptide, Cβ | WYRQDPGQGLRLIYYSQIVNDFQKGDIAEGYSVSREKKESFPLIVTSAQKNP | |
| (substituted) | TASYLCASEAFFGQGTRLTVVEDLRNVTPPKVSLFEPSKAEIANKQKATLVC | |
| | LARGFFPDHVELSWWVNGKEVHSGVCTDPQAYKESNYSYCLSSRLRVSATFW | |
| | HNPRNHFRCQVQFHGLSEEDKWPEGSPKPVTQNISAEAWGRADCGITSASYQ | |
| | QGVLSATILYEILLGKATLYAVLVSTLVVMAMVKRKNS | |
| β chain with alternative | MANQVLCCVVLCFLGANTVDGGITQSPKYLFRKEGQNVTLSCEQNLNHDAMY | 2369 |
| signal peptide, Cβ | WYRQDPGQGLRLIYYSQIVNDFQKGDIAEGYSVSREKKESFPLIVTSAQKNP | |
| (substituted) | TASYLCASEAFFGQGTRLTVVEDLRNVTPPKVSLFEPSKAEIANKQKATLVC | |
| | LARGFFPDHVELSWWVNGKEVHSGVCTDPQAYKESNYSYCLSSRLRVSATFW | |
| | HNPRNHFRCQVQFHGLSEEDKWPEGSPKPVTQNISAEAWGRADCGITSASYQ | |
| | QGVLSATILYEILLGKATLYAVLVSTLVVMAMVKRKNS | |
| β chain with alternative | MHNQVLCCVVLCFLGANTVDGGITQSPKYLFRKEGQNVTLSCEQNLNHDAMY | 2370 |
| signal peptide, Cβ | WYRQDPGQGLRLIYYSQIVNDFQKGDIAEGYSVSREKKESFPLIVTSAQKNP | |
| (substituted) | TASYLCASEAFFGQGTRLTVVEDLRNVTPPKVSLFEPSKAEIANKQKATLVC | |
| | LARGFFPDHVELSWWVNGKEVHSGVCTDPQAYKESNYSYCLSSRLRVSATFW | |
| | HNPRNHFRCQVQFHGLSEEDKWPEGSPKPVTQNISAEAWGRADCGITSASYQ | |
| | QGVLSATILYEILLGKATLYAVLVSTLVVMAMVKRKNS | |

[0201] In some embodiments, TCR037 interacts with and/or is specific for p53. In some embodiments, the peptide is from a neoantigen of p53. In some embodiments, the neoantigen has the amino acid change R248Q relative to the wild type p53 sequence. In some embodiments, TCR037 interacts with the neoantigen in the context of HLA-A*02:01, as described in International Publication No. WO 2019/067243, incorporated herein by reference in its entirety.

TABLE 6AL
Amino acid sequences of TCR038.

| | | SEQ |
|---|---|---|
| | | ID |
| Description | Sequence | NO: |
| CDR1α | TISGTDY | 1371 |
| CDR2α | GLTSN | 1372 |
| CDR3α | ILASGAGSYQLT | 1373 |
| Vα without signal | KTTQPNSMESNEEEPVHLPCNHSTISGTDYIHWYRQLPSQGPEYVIHGLTSN | 1374 |
| peptide (SignalP) | VNNRMASLAIAEDRKSSTLILHRATLRDAAVYYCILASGAGSYQLTFGKGTK | |
| | LSVIP | |
| Vα without signal | DAKTTQPNSMESNEEEPVHLPCNHSTISGTDYIHWYRQLPSQGPEYVIHGLT | 1375 |
| peptide (IMGT) | SNVNNRMASLAIAEDRKSSTLILHRATLRDAAVYYCILASGAGSYQLTFGKG | |
| | TKLSVIP | |
| Vα | MXLVTSITVLLSLGIMGDAKTTQPNSMESNEEEPVHLPCNHSTISGTDYIHW | 1376 |
| | YRQLPSQGPEYVIHGLTSNVNNRMASLAIAEDRKSSTLILHRATLRDAAVYY | 1377 |
| | CILASGAGSYQLTFGKGTKLSVIP | |
| | (X = any amino acid) | |
| α chain with WT signal | MKLVTSITVLLSLGIMGDAKTTQPNSMESNEEEPVHLPCNHSTISGTDYIHW | 1378 |
| peptide, Cα | YRQLPSQGPEYVIHGLTSNVNNRMASLAIAEDRKSSTLILHRATLRDAAVYY | |
| (substituted) | CILASGAGSYQLTFGKGTKLSVIPNIQNPEPAVYQLKDPRSQDSTLCLFTDF | |
| | DSQINVPKTMESGTFITDKCVLDMKAMDSKSNGAIAWSNQTSFTCQDIFKET | |
| | NATYPSSDVPCDATLTEKSFETDMNLNFQNLLVIVLRILLLKVAGFNLLMTL | |
| | RLWSS | |
| α chain with | MALVTSITVLLSLGIMGDAKTTQPNSMESNEEEPVHLPCNHSTISGTDYIHW | 1379 |
| alternative signal | YRQLPSQGPEYVIHGLTSNVNNRMASLAIAEDRKSSTLILHRATLRDAAVYY | |
| peptide, Cα | CILASGAGSYQLTFGKGTKLSVIPNIQNPEPAVYQLKDPRSQDSTLCLFTDF | |
| (substituted) | DSQINVPKTMESGTFITDKCVLDMKAMDSKSNGAIAWSNQTSFTCQDIFKET | |
| | NATYPSSDVPCDATLTEKSFETDMNLNFQNLLVIVLRILLLKVAGFNLLMTL | |
| | RLWSS | |
| α chain with | MHLVTSITVLLSLGIMGDAKTTQPNSMESNEEEPVHLPCNHSTISGTDYIHW | 1380 |
| alternative signal | YRQLPSQGPEYVIHGLTSNVNNRMASLAIAEDRKSSTLILHRATLRDAAVYY | |
| peptide, Cα | CILASGAGSYQLTFGKGTKLSVIPNIQNPEPAVYQLKDPRSQDSTLCLFTDF | |
| (substituted) | DSQINVPKTMESGTFITDKCVLDMKAMDSKSNGAIAWSNQTSFTCQDIFKET | |
| | NATYPSSDVPCDATLTEKSFETDMNLNFQNLLVIVLRILLLKVAGFNLLMTL | |
| | RLWSS | |
| CDR1β | LGHD | 2371 |
| CDR2β | YNNKEL | 2372 |
| CDR3β | ASRTIGYNTEAF | 2373 |
| Vβ without signal | QTPKYLVTQMGNDKSIKCEQNLGHDTMYWYKQDSKKFLKIMFSYNNKELIIN | 2374 |
| peptide (SignalP) | ETVPNRFSPKSPDKAHLNLHINSLELGDSAVYFCASRTIGYNTEAFFGQGTR | |
| | LTVV | |
| Vβ without signal | DTAVSQTPKYLVTQMGNDKSIKCEQNLGHDTMYWYKQDSKKFLKIMFSYNNK | 2375 |
| peptide (IMGT) | ELIINETVPNRFSPKSPDKAHLNLHINSLELGDSAVYFCASRTIGYNTEAFF | |
| | GQGTRLTVV | |
| Vβ | MXCRLLCCVVFCLLQAGPLDTAVSQTPKYLVTQMGNDKSIKCEQNLGHDTMY | 2376 |
| | WYKQDSKKFLKIMFSYNNKELIINETVPNRFSPKSPDKAHLNLHINSLELGD | 2377 |
| | SAVYFCASRTIGYNTEAFFGQGTRLTVV | |
| | (X = any amino acid) | |
| β chain with WT signal | MGCRLLCCVVFCLLQAGPLDTAVSQTPKYLVTQMGNDKSIKCEQNLGHDTMY | 2378 |
| peptide, Cβ | WYKQDSKKFLKIMFSYNNKELIINETVPNRFSPKSPDKAHLNLHINSLELGD | |
| (substituted) | SAVYFCASRTIGYNTEAFFGQGTRLTVVEDLRNVTPPKVSLFEPSKAEIANK | |
| | QKATLVCLARGFFPDHVELSWWVNGKEVHSGVCTDPQAYKESNYSYCLSSRL | |
| | RVSATFWHNPRNHFRCQVQFHGLSEEDKWPEGSPKPVTQNISAEAWGRADCG | |
| | ITSASYQQGVLSATILYEILLGKATLYAVLVSTLVVMAMVKRKNS | |
| β chain with alternative | MACRLLCCVVFCLLQAGPLDTAVSQTPKYLVTQMGNDKSIKCEQNLGHDTMY | 2379 |
| signal peptide, Cβ | WYKQDSKKFLKIMFSYNNKELIINETVPNRFSPKSPDKAHLNLHINSLELGD | |
| (substituted) | SAVYFCASRTIGYNTEAFFGQGTRLTVVEDLRNVTPPKVSLFEPSKAEIANK | |
| | QKATLVCLARGFFPDHVELSWWVNGKEVHSGVCTDPQAYKESNYSYCLSSRL | |
| | RVSATFWHNPRNHFRCQVQFHGLSEEDKWPEGSPKPVTQNISAEAWGRADCG | |
| | ITSASYQQGVLSATILYEILLGKATLYAVLVSTLVVMAMVKRKNS | |
| β chain with alternative | MHCRLLCCVVFCLLQAGPLDTAVSQTPKYLVTQMGNDKSIKCEQNLGHDTMY | 2380 |
| signal peptide, Cβ | WYKQDSKKFLKIMFSYNNKELIINETVPNRFSPKSPDKAHLNLHINSLELGD | |
| (substituted) | SAVYFCASRTIGYNTEAFFGQGTRLTVVEDLRNVTPPKVSLFEPSKAEIANK | |
| | QKATLVCLARGFFPDHVELSWWVNGKEVHSGVCTDPQAYKESNYSYCLSSRL | |
| | RVSATFWHNPRNHFRCQVQFHGLSEEDKWPEGSPKPVTQNISAEAWGRADCG | |
| | ITSASYQQGVLSATILYEILLGKATLYAVLVSTLVVMAMVKRKNS | |

[0202] In some embodiments, TCR038 interacts with and/or is specific for p53. In some embodiments, the peptide is from a neoantigen of p53. In some embodiments, the neoantigen has the amino acid change R248Q relative to the wild type p53 sequence. In some embodiments, TCR038 interacts with the neoantigen in the context of HLA-A*02:01, as described in International Publication No. WO 2019/067243, incorporated herein by reference in its entirety.

TABLE 6AM
Amino acid sequences of TCR039.

| | | SEQ |
|---|---|---|
| | | ID |
| Description | Sequence | NO: |
| CDR1α | VGISA | 1381 |
| CDR2α | LSSGK | 1382 |
| CDR3α | AALSYNTDKLI | 1383 |
| Vα without signal | AKNEVEQSPQNLTAQEGEFITINCSYSVGISALHWLQQHPGGGIVSLFMLSS | 1384 |
| peptide (SignalP) | GKKKHGRLIATINIQEKHSSLHITASHPRDSAVYICAALSYNTDKLIFGTGT | |
| | RLQVFP | |
| Vα without signal | KNEVEQSPQNLTAQEGEFITINCSYSVGISALHWLQQHPGGGIVSLFMLSSG | 1385 |
| peptide (IMGT) | KKKHGRLIATINIQEKHSSLHITASHPRDSAVYICAALSYNTDKLIFGTGTR | |
| | LQVFP | |
| Vα | MXKIRQFLLAILWLQLSCVSAAKNEVEQSPQNLTAQEGEFITINCSYSVGIS | 1386 |
| | ALHWLQQHPGGGIVSLFMLSSGKKKHGRLIATINIQEKHSSLHITASHPRDS | 1387 |
| | AVYICAALSYNTDKLIFGTGTRLQVFP | |
| | (X = any amino acid) | |
| α chain with WT signal | MKKIRQFLLAILWLQLSCVSAAKNEVEQSPQNLTAQEGEFITINCSYSVGIS | 1388 |
| peptide, Cα | ALHWLQQHPGGGIVSLFMLSSGKKKHGRLIATINIQEKHSSLHITASHPRDS | |
| (substituted) | AVYICAALSYNTDKLIFGTGTRLQVFPNIQNPEPAVYQLKDPRSQDSTLCLF | |
| | TDFDSQINVPKTMESGTFITDKCVLDMKAMDSKSNGAIAWSNQTSFTCQDIF | |
| | KETNATYPSSDVPCDATLTEKSFETDMNLNFQNLLVIVLRILLLKVAGFNLL | |
| | MTLRLWSS | |
| α chain with | MAKIRQFLLAILWLQLSCVSAAKNEVEQSPQNLTAQEGEFITINCSYSVGIS | 1389 |
| alternative signal | ALHWLQQHPGGGIVSLFMLSSGKKKHGRLIATINIQEKHSSLHITASHPRDS | |
| peptide, Cα | AVYICAALSYNTDKLIFGTGTRLQVFPNIQNPEPAVYQLKDPRSQDSTLCLF | |
| (substituted) | TDFDSQINVPKTMESGTFITDKCVLDMKAMDSKSNGAIAWSNQTSFTCQDIF | |
| | KETNATYPSSDVPCDATLTEKSFETDMNLNFQNLLVIVLRILLLKVAGFNLL | |
| | MTLRLWSS | |
| α chain with | MHKIRQFLLAILWLQLSCVSAAKNEVEQSPQNLTAQEGEFITINCSYSVGIS | 1390 |
| alternative signal | ALHWLQQHPGGGIVSLFMLSSGKKKHGRLIATINIQEKHSSLHITASHPRDS | |
| peptide, Cα | AVYICAALSYNTDKLIFGTGTRLQVFPNIQNPEPAVYQLKDPRSQDSTLCLF | |
| (substituted) | TDFDSQINVPKTMESGTFITDKCVLDMKAMDSKSNGAIAWSNQTSFTCQDIF | |
| | KETNATYPSSDVPCDATLTEKSFETDMNLNFQNLLVIVLRILLLKVAGFNLL | |
| | MTLRLWSS | |
| CDR1ß | SGHTA | 2381 |
| CDR2β | FQGTGA | 2382 |
| CDR3ß | ASSLSGLLQETQY | 2383 |
| Vβ without signal | GVSQTPSNKVTEKGKYVELRCDPISGHTALYWYRQSLGQGPEFLIYFQGTGA | 2384 |
| peptide (SignalP) | ADDSGLPNDRFFAVRPEGSVSTLKIQRTERGDSAVYLCASSLSGLLQETQYF | |
| | GPGTRLLVL | |
| Vβ without signal | GAGVSQTPSNKVTEKGKYVELRCDPISGHTALYWYRQSLGQGPEFLIYFQGT | 2385 |
| peptide (IMGT) | GAADDSGLPNDRFFAVRPEGSVSTLKIQRTERGDSAVYLCASSLSGLLQETQ | |
| | YFGPGTRLLVL | |
| Vβ | MXTRLLCWAALCLLGADHTGAGVSQTPSNKVTEKGKYVELRCDPISGHTALY | 2386 |
| | WYRQSLGQGPEFLIYFQGTGAADDSGLPNDRFFAVRPEGSVSTLKIQRTERG | 2387 |
| | DSAVYLCASSLSGLLQETQYFGPGTRLLVL | |
| | (X = any amino acid) | |
| β chain with WT signal | MGTRLLCWAALCLLGADHTGAGVSQTPSNKVTEKGKYVELRCDPISGHTALY | 2388 |
| peptide, Cβ | WYRQSLGQGPEFLIYFQGTGAADDSGLPNDRFFAVRPEGSVSTLKIQRTERG | |
| (substituted) | DSAVYLCASSLSGLLQETQYFGPGTRLLVLEDLRNVTPPKVSLFEPSKAEIA | |
| | NKQKATLVCLARGFFPDHVELSWWVNGKEVHSGVCTDPQAYKESNYSYCLSS | |
| | RLRVSATFWHNPRNHFRCQVQFHGLSEEDKWPEGSPKPVTQNISAEAWGRAD | |
| | CGITSASYQQGVLSATILYEILLGKATLYAVLVSTLVVMAMVKRKNS | |
| β chain with alternative | MATRLLCWAALCLLGADHTGAGVSQTPSNKVTEKGKYVELRCDPISGHTALY | 2389 |
| signal peptide, Cβ | WYRQSLGQGPEFLIYFQGTGAADDSGLPNDRFFAVRPEGSVSTLKIQRTERG | |
| (substituted) | DSAVYLCASSLSGLLQETQYFGPGTRLLVLEDLRNVTPPKVSLFEPSKAEIA | |
| | NKQKATLVCLARGFFPDHVELSWWVNGKEVHSGVCTDPQAYKESNYSYCLSS | |
| | RLRVSATFWHNPRNHFRCQVQFHGLSEEDKWPEGSPKPVTQNISAEAWGRAD | |
| | CGITSASYQQGVLSATILYEILLGKATLYAVLVSTLVVMAMVKRKNS | |
| β chain with alternative | MHTRLLCWAALCLLGADHTGAGVSQTPSNKVTEKGKYVELRCDPISGHTALY | 2390 |
| signal peptide, Cβ | WYRQSLGQGPEFLIYFQGTGAADDSGLPNDRFFAVRPEGSVSTLKIQRTERG | |
| (substituted) | DSAVYLCASSLSGLLQETQYFGPGTRLLVLEDLRNVTPPKVSLFEPSKAEIA | |
| | NKQKATLVCLARGFFPDHVELSWWVNGKEVHSGVCTDPQAYKESNYSYCLSS | |
| | RLRVSATFWHNPRNHFRCQVQFHGLSEEDKWPEGSPKPVTQNISAEAWGRAD | |
| | CGITSASYQQGVLSATILYEILLGKATLYAVLVSTLVVMAMVKRKNS | |

[0203] In some embodiments, TCR039 interacts with and/or is specific for p53. In some embodiments, the peptide is from a neoantigen of p53. In some embodiments, the neoantigen has the amino acid change R248Q relative to the wild type p53 sequence. In some embodiments, TCR039 interacts with the neoantigen in the context of HLA-A*02:01, as described in International Publication No. WO 2019/067243, incorporated herein by reference in its entirety.

TABLE 6AN
Amino acid sequences of TCR040.

| | | SEQ |
|---|---|---|
| | | ID |
| Description | Sequence | NO: |
| CDR1α | ATGYPS | 1391 |
| CDR2α | ATKADDK | 1392 |
| CDR3α | ALSHTGSSNTGKLI | 1393 |
| Vα without signal | NSVTQMEGPVTLSEEAFLTINCTYTATGYPSLFWYVQYPGEGLQLLLKATKA | 1394 |
| peptide (SignalP) | DDKGSNKGFEATYRKETTSFHLEKGSVQVSDSAVYFCALSHTGSSNTGKLIF | |
| | GQGTRLQVKP | |
| Vα without signal | GNSVTQMEGPVTLSEEAFLTINCTYTATGYPSLFWYVQYPGEGLQLLLKATK | 1395 |
| peptide (IMGT) | ADDKGSNKGFEATYRKETTSFHLEKGSVQVSDSAVYFCALSHTGSSNTGKLI | |
| | FGQGTRLQVKP | |
| Vα | MXYSPGLVSLILLLLGRTRGNSVTQMEGPVTLSEEAFLTINCTYTATGYPSL | 1396 |
| | FWYVQYPGEGLQLLLKATKADDKGSNKGFEATYRKETTSFHLEKGSVQVSDS | 1397 |
| | AVYFCALSHTGSSNTGKLIFGQGTRLQVKP | |
| | (X = any amino acid) | |
| α chain with WT signal | MNYSPGLVSLILLLLGRTRGNSVTQMEGPVTLSEEAFLTINCTYTATGYPSL | 1398 |
| peptide, Cα | FWYVQYPGEGLQLLLKATKADDKGSNKGFEATYRKETTSFHLEKGSVQVSDS | |
| (substituted) | AVYFCALSHTGSSNTGKLIFGQGTRLQVKPNIQNPEPAVYQLKDPRSQDSTL | |
| | CLFTDFDSQINVPKTMESGTFITDKCVLDMKAMDSKSNGAIAWSNQTSFTCQ | |
| | DIFKETNATYPSSDVPCDATLTEKSFETDMNLNFQNLLVIVLRILLLKVAGF | |
| | NLLMTLRLWSS | |
| α chain with | MAYSPGLVSLILLLLGRTRGNSVTQMEGPVTLSEEAFLTINCTYTATGYPSL | 1399 |
| alternative signal | FWYVQYPGEGLQLLLKATKADDKGSNKGFEATYRKETTSFHLEKGSVQVSDS | |
| peptide, Cα | AVYFCALSHTGSSNTGKLIFGQGTRLQVKPNIQNPEPAVYQLKDPRSQDSTL | |
| (substituted) | CLFTDFDSQINVPKTMESGTFITDKCVLDMKAMDSKSNGAIAWSNQTSFTCQ | |
| | DIFKETNATYPSSDVPCDATLTEKSFETDMNLNFQNLLVIVLRILLLKVAGF | |
| | NLLMTLRLWSS | |
| α chain with | MHYSPGLVSLILLLLGRTRGNSVTQMEGPVTLSEEAFLTINCTYTATGYPSL | 1400 |
| alternative signal | FWYVQYPGEGLQLLLKATKADDKGSNKGFEATYRKETTSFHLEKGSVQVSDS | |
| peptide, Cα | AVYFCALSHTGSSNTGKLIFGQGTRLQVKPNIQNPEPAVYQLKDPRSQDSTL | |
| (substituted) | CLFTDFDSQINVPKTMESGTFITDKCVLDMKAMDSKSNGAIAWSNQTSFTCQ | |
| | DIFKETNATYPSSDVPCDATLTEKSFETDMNLNFQNLLVIVLRILLLKVAGF | |
| | NLLMTLRLWSS | |
| CDR1β | SGHAT | 2391 |
| CDR2ß | FQNNGV | 2392 |
| CDR3ß | ASSTGGGRHQPQH | 2393 |
| Vβ without signal | GVAQSPRYKIIEKRQSVAFWCNPISGHATLYWYQQILGQGPKLLIQFQNNGV | 2394 |
| peptide (SignalP) | VDDSQLPKDRFSAERLKGVDSTLKIQPAKLEDSAVYLCASSTGGGRHQPQHF | |
| | GDGTRLSIL | |
| Vβ without signal | EAGVAQSPRYKIIEKRQSVAFWCNPISGHATLYWYQQILGQGPKLLIQFQNN | 2395 |
| peptide (IMGT) | GVVDDSQLPKDRFSAERLKGVDSTLKIQPAKLEDSAVYLCASSTGGGRHQPQ | |
| | HFGDGTRLSIL | |
| Vβ | MXTRLLCWAALCLLGAELTEAGVAQSPRYKIIEKRQSVAFWCNPISGHATLY | 2396 |
| | WYQQILGQGPKLLIQFQNNGVVDDSQLPKDRFSAERLKGVDSTLKIQPAKLE | 2397 |
| | DSAVYLCASSTGGGRHQPQHFGDGTRLSIL | |
| | (X = any amino acid) | |
| β chain with WT signal | MGTRLLCWAALCLLGAELTEAGVAQSPRYKIIEKRQSVAFWCNPISGHATLY | 2398 |
| peptide, Cβ | WYQQILGQGPKLLIQFQNNGVVDDSQLPKDRFSAERLKGVDSTLKIQPAKLE | |
| (substituted) | DSAVYLCASSTGGGRHQPQHFGDGTRLSILEDLRNVTPPKVSLFEPSKAEIA | |
| | NKQKATLVCLARGFFPDHVELSWWVNGKEVHSGVCTDPQAYKESNYSYCLSS | |
| | RLRVSATFWHNPRNHFRCQVQFHGLSEEDKWPEGSPKPVTQNISAEAWGRAD | |
| | CGITSASYQQGVLSATILYEILLGKATLYAVLVSTLVVMAMVKRKNS | |
| β chain with alternative | MATRLLCWAALCLLGAELTEAGVAQSPRYKIIEKRQSVAFWCNPISGHATLY | 2399 |
| signal peptide, Cβ | WYQQILGQGPKLLIQFQNNGVVDDSQLPKDRFSAERLKGVDSTLKIQPAKLE | |
| (substituted) | DSAVYLCASSTGGGRHQPQHFGDGTRLSILEDLRNVTPPKVSLFEPSKAEIA | |
| | NKQKATLVCLARGFFPDHVELSWWVNGKEVHSGVCTDPQAYKESNYSYCLSS | |
| | RLRVSATFWHNPRNHFRCQVQFHGLSEEDKWPEGSPKPVTQNISAEAWGRAD | |
| | CGITSASYQQGVLSATILYEILLGKATLYAVLVSTLVVMAMVKRKNS | |
| β chain with alternative | MHTRLLCWAALCLLGAELTEAGVAQSPRYKIIEKRQSVAFWCNPISGHATLY | 2400 |
| signal peptide, Cβ | WYQQILGQGPKLLIQFQNNGVVDDSQLPKDRFSAERLKGVDSTLKIQPAKLE | |
| (substituted) | DSAVYLCASSTGGGRHQPQHFGDGTRLSILEDLRNVTPPKVSLFEPSKAEIA | |
| | NKQKATLVCLARGFFPDHVELSWWVNGKEVHSGVCTDPQAYKESNYSYCLSS | |
| | RLRVSATFWHNPRNHFRCQVQFHGLSEEDKWPEGSPKPVTQNISAEAWGRAD | |
| | CGITSASYQQGVLSATILYEILLGKATLYAVLVSTLVVMAMVKRKNS | |

[0204] In some embodiments, TCR040 interacts with and/or is specific for p53. In some embodiments, the peptide is from a neoantigen of p53. In some embodiments, the neoantigen has the amino acid change R248Q relative to the wild type p53 sequence. In some embodiments, TCR040 interacts with the neoantigen in the context of HLA-A*02:01, as described in International Publication No. WO 2019/067243, incorporated herein by reference in its entirety.

TABLE 6AQ
Amino acid sequences of TCR041.

| | | SEQ |
|---|---|---|
| | | ID |
| Description | Sequence | NO: |
| CDR1α | ATGYPS | 1401 |
| CDR2α | ATKADDK | 1402 |
| CDR3α | ALSQTGSSKTGKLI | 1403 |
| Vα without signal | NSVTQMEGPVTLSEEAFLTINCTYTATGYPSLFWYVQYPGEGLQLLLKATKA | 1404 |
| peptide (SignalP) | DDKGSNKGFEATYRKETTSFHLEKGSVQVSDSAVYFCALSQTGSSKTGKLIF | |
| | GQGTRLQVKP | |
| Vα without signal | GNSVTQMEGPVTLSEEAFLTINCTYTATGYPSLFWYVQYPGEGLQLLLKATK | 1405 |
| peptide (IMGT) | ADDKGSNKGFEATYRKETTSFHLEKGSVQVSDSAVYFCALSQTGSSKTGKLI | |
| | FGQGTRLQVKP | |
| Vα | MXYSPGLVSLILLLLGRTRGNSVTQMEGPVTLSEEAFLTINCTYTATGYPSL | 1406 |
| | FWYVQYPGEGLQLLLKATKADDKGSNKGFEATYRKETTSFHLEKGSVQVSDS | |
| | AVYFCALSQTGSSKTGKLIFGQGTRLQVKP | 1407 |
| | (X = any amino acid) | |
| α chain with WT signal | MNYSPGLVSLILLLLGRTRGNSVTQMEGPVTLSEEAFLTINCTYTATGYPSL | 1408 |
| peptide, Cα | FWYVQYPGEGLQLLLKATKADDKGSNKGFEATYRKETTSFHLEKGSVQVSDS | |
| (substituted) | AVYFCALSQTGSSKTGKLIFGQGTRLQVKPNIQNPEPAVYQLKDPRSQDSTL | |
| | CLFTDFDSQINVPKTMESGTFITDKCVLDMKAMDSKSNGAIAWSNQTSFTCQ | |
| | DIFKETNATYPSSDVPCDATLTEKSFETDMNLNFQNLLVIVLRILLLKVAGF | |
| | NLLMTLRLWSS | |
| α chain with | MAYSPGLVSLILLLLGRTRGNSVTQMEGPVTLSEEAFLTINCTYTATGYPSL | 1409 |
| alternative signal | FWYVQYPGEGLQLLLKATKADDKGSNKGFEATYRKETTSFHLEKGSVQVSDS | |
| peptide, Cα | AVYFCALSQTGSSKTGKLIFGQGTRLQVKPNIQNPEPAVYQLKDPRSQDSTL | |
| (substituted) | CLFTDFDSQINVPKTMESGTFITDKCVLDMKAMDSKSNGAIAWSNQTSFTCQ | |
| | DIFKETNATYPSSDVPCDATLTEKSFETDMNLNFQNLLVIVLRILLLKVAGF | |
| | NLLMTLRLWSS | |
| α chain with | MHYSPGLVSLILLLLGRTRGNSVTQMEGPVTLSEEAFLTINCTYTATGYPSL | 1410 |
| alternative signal | FWYVQYPGEGLQLLLKATKADDKGSNKGFEATYRKETTSFHLEKGSVQVSDS | |
| peptide, Cα | AVYFCALSQTGSSKTGKLIFGQGTRLQVKPNIQNPEPAVYQLKDPRSQDSTL | |
| (substituted) | CLFTDFDSQINVPKTMESGTFITDKCVLDMKAMDSKSNGAIAWSNQTSFTCQ | |
| | DIFKETNATYPSSDVPCDATLTEKSFETDMNLNFQNLLVIVLRILLLKVAGF | |
| | NLLMTLRLWSS | |
| CDR1ß | SGHAT | 2401 |
| CDR2ß | FQNNGV | 2402 |
| CDR3β | ASSTGGGRHQPQH | 2403 |
| Vβ without signal | GVAQSPRYKIIEKRQSVAFWCNPISGHATLYWYQQILGQGPKLLIQFQNNGV | 2404 |
| peptide (SignalP) | VDDSQLPKDRFSAERLKGVDSTLKIQPAKLEDSAVYLCASSTGGGRHQPQHF | |
| | GDGTRLSIL | |
| Vβ without signal | EAGVAQSPRYKIIEKRQSVAFWCNPISGHATLYWYQQILGQGPKLLIQFQNN | 2405 |
| peptide (IMGT) | GVVDDSQLPKDRFSAERLKGVDSTLKIQPAKLEDSAVYLCASSTGGGRHQPQ | |
| | HFGDGTRLSIL | |
| Vβ | MXTRLLCWAALCLLGAELTEAGVAQSPRYKIIEKRQSVAFWCNPISGHATLY | 2406 |
| | WYQQILGQGPKLLIQFQNNGVVDDSQLPKDRFSAERLKGVDSTLKIQPAKLE | 2407 |
| | DSAVYLCASSTGGGRHQPQHFGDGTRLSIL | |
| | (X = any amino acid) | |
| β chain with WT signal | MGTRLLCWAALCLLGAELTEAGVAQSPRYKIIEKRQSVAFWCNPISGHATLY | 2408 |
| peptide, Cβ | WYQQILGQGPKLLIQFQNNGVVDDSQLPKDRFSAERLKGVDSTLKIQPAKLE | |
| (substituted) | DSAVYLCASSTGGGRHQPQHFGDGTRLSILEDLRNVTPPKVSLFEPSKAEIA | |
| | NKQKATLVCLARGFFPDHVELSWWVNGKEVHSGVCTDPQAYKESNYSYCLSS | |
| | RLRVSATFWHNPRNHFRCQVQFHGLSEEDKWPEGSPKPVTQNISAEAWGRAD | |
| | CGITSASYQQGVLSATILYEILLGKATLYAVLVSTLVVMAMVKRKNS | |
| β chain with alternative | MATRLLCWAALCLLGAELTEAGVAQSPRYKIIEKRQSVAFWCNPISGHATLY | 2409 |
| signal peptide, Cβ | WYQQILGQGPKLLIQFQNNGVVDDSQLPKDRFSAERLKGVDSTLKIQPAKLE | |
| (substituted) | DSAVYLCASSTGGGRHQPQHFGDGTRLSILEDLRNVTPPKVSLFEPSKAEIA | |
| | NKQKATLVCLARGFFPDHVELSWWVNGKEVHSGVCTDPQAYKESNYSYCLSS | |
| | RLRVSATFWHNPRNHFRCQVQFHGLSEEDKWPEGSPKPVTQNISAEAWGRAD | |
| | CGITSASYQQGVLSATILYEILLGKATLYAVLVSTLVVMAMVKRKNS | |
| β chain with alternative | MHTRLLCWAALCLLGAELTEAGVAQSPRYKIIEKRQSVAFWCNPISGHATLY | 2410 |
| signal peptide, Cβ | WYQQILGQGPKLLIQFQNNGVVDDSQLPKDRFSAERLKGVDSTLKIQPAKLE | |
| (substituted) | DSAVYLCASSTGGGRHQPQHFGDGTRLSILEDLRNVTPPKVSLFEPSKAEIA | |
| | NKQKATLVCLARGFFPDHVELSWWVNGKEVHSGVCTDPQAYKESNYSYCLSS | |
| | RLRVSATFWHNPRNHFRCQVQFHGLSEEDKWPEGSPKPVTQNISAEAWGRAD | |
| | CGITSASYQQGVLSATILYEILLGKATLYAVLVSTLVVMAMVKRKNS | |

[0205] In some embodiments, TCR041 interacts with and/or is specific for p53. In some embodiments, the peptide is from a neoantigen of p53. In some embodiments, the neoantigen has the amino acid change R248Q relative to the wild type p53 sequence. In some embodiments, TCR041 interacts with the neoantigen in the context of HLA-A*02:01, as described in International Publication No. WO 2019/067243, incorporated herein by reference in its entirety.

TABLE 6AP
Amino acid sequences of TCR042.

| | | SEQ |
|---|---|---|
| | | ID |
| Description | Sequence | NO: |
| CDR1α | ATGYPS | 1411 |
| CDR2α | ATKADDK | 1412 |
| CDR3α | ALSQTGSSNTGKLI | 1413 |
| Vα without signal | NSVTQMEGPVTLSEEAFLTINCTYTATGYPSLFWYVQYPGEGLQLLLKATKA | 1414 |
| peptide (SignalP) | DDKGSNKGFEATYRKETTSFHLEKGSVQVSDSAVYFCALSQTGSSNTGKLIF | |
| | GQGTRLQVKP | |
| Vα without signal | GNSVTQMEGPVTLSEEAFLTINCTYTATGYPSLFWYVQYPGEGLQLLLKATK | 1415 |
| peptide (IMGT) | ADDKGSNKGFEATYRKETTSFHLEKGSVQVSDSAVYFCALSQTGSSNTGKLI | |
| | FGQGTRLQVKP | |
| Vα | MXYSPGLVSLILLLLGRTRGNSVTQMEGPVTLSEEAFLTINCTYTATGYPSL | 1416 |
| | FWYVQYPGEGLQLLLKATKADDKGSNKGFEATYRKETTSFHLEKGSVQVSDS | 1417 |
| | AVYFCALSQTGSSNTGKLIFGQGTRLQVKP | |
| | (X = any amino acid) | |
| α chain with WT signal | MNYSPGLVSLILLLLGRTRGNSVTQMEGPVTLSEEAFLTINCTYTATGYPSL | 1418 |
| peptide, Cα | FWYVQYPGEGLQLLLKATKADDKGSNKGFEATYRKETTSFHLEKGSVQVSDS | |
| (substituted) | AVYFCALSQTGSSNTGKLIFGQGTRLQVKPNIQNPEPAVYQLKDPRSQDSTL | |
| | CLFTDFDSQINVPKTMESGTFITDKCVLDMKAMDSKSNGAIAWSNQTSFTCQ | |
| | DIFKETNATYPSSDVPCDATLTEKSFETDMNLNFQNLLVIVLRILLLKVAGF | |
| | NLLMTLRLWSS | |
| α chain with | MAYSPGLVSLILLLLGRTRGNSVTQMEGPVTLSEEAFLTINCTYTATGYPSL | 1419 |
| alternative signal | FWYVQYPGEGLQLLLKATKADDKGSNKGFEATYRKETTSFHLEKGSVQVSDS | |
| peptide, Cα | AVYFCALSQTGSSNTGKLIFGQGTRLQVKPNIQNPEPAVYQLKDPRSQDSTL | |
| (substituted) | CLFTDFDSQINVPKTMESGTFITDKCVLDMKAMDSKSNGAIAWSNQTSFTCQ | |
| | DIFKETNATYPSSDVPCDATLTEKSFETDMNLNFQNLLVIVLRILLLKVAGF | |
| | NLLMTLRLWSS | |
| α chain with | MHYSPGLVSLILLLLGRTRGNSVTQMEGPVTLSEEAFLTINCTYTATGYPSL | 1420 |
| alternative signal | FWYVQYPGEGLQLLLKATKADDKGSNKGFEATYRKETTSFHLEKGSVQVSDS | |
| peptide, Cα | AVYFCALSQTGSSNTGKLIFGQGTRLQVKPNIQNPEPAVYQLKDPRSQDSTL | |
| (substituted) | CLFTDFDSQINVPKTMESGTFITDKCVLDMKAMDSKSNGAIAWSNQTSFTCQ | |
| | DIFKETNATYPSSDVPCDATLTEKSFETDMNLNFQNLLVIVLRILLLKVAGF | |
| | NLLMTLRLWSS | |
| CDR1β | SGHAT | 2411 |
| CDR2β | FQNNGV | 2412 |
| CDR3β | ASSTGGGRHQPQH | 2413 |
| Vβ without signal | GVAQSPRYKIIEKRQSVAFWCNPISGHATLYWYQQILGQGPKLLIQFQNNGV | 2414 |
| peptide (SignalP) | VDDSQLPKDRFSAERLKGVDSTLKIQPAKLEDSAVYLCASSTGGGRHQPQHF | |
| | GDGTRLSIL | |
| Vβ without signal | EAGVAQSPRYKIIEKRQSVAFWCNPISGHATLYWYQQILGQGPKLLIQFQNN | 2415 |
| peptide (IMGT) | GVVDDSQLPKDRFSAERLKGVDSTLKIQPAKLEDSAVYLCASSTGGGRHQPQ | |
| | HFGDGTRLSIL | |
| Vβ | MXTRLLCWAALCLLGAELTEAGVAQSPRYKIIEKRQSVAFWCNPISGHATLY | 2416 |
| | WYQQILGQGPKLLIQFQNNGVVDDSQLPKDRFSAERLKGVDSTLKIQPAKLE | 2417 |
| | DSAVYLCASSTGGGRHQPQHFGDGTRLSIL | |
| | (X = any amino acid) | |
| β chain with WT signal | MGTRLLCWAALCLLGAELTEAGVAQSPRYKIIEKRQSVAFWCNPISGHATLY | 2418 |
| peptide, Cβ | WYQQILGQGPKLLIQFQNNGVVDDSQLPKDRFSAERLKGVDSTLKIQPAKLE | |
| (substituted) | DSAVYLCASSTGGGRHQPQHFGDGTRLSILEDLRNVTPPKVSLFEPSKAEIA | |
| | NKQKATLVCLARGFFPDHVELSWWVNGKEVHSGVCTDPQAYKESNYSYCLSS | |
| | RLRVSATFWHNPRNHFRCQVQFHGLSEEDKWPEGSPKPVTQNISAEAWGRAD | |
| | CGITSASYQQGVLSATILYEILLGKATLYAVLVSTLVVMAMVKRKNS | |
| β chain with alternative | MATRLLCWAALCLLGAELTEAGVAQSPRYKIIEKRQSVAFWCNPISGHATLY | 2419 |
| signal peptide, Cβ | WYQQILGQGPKLLIQFQNNGVVDDSQLPKDRFSAERLKGVDSTLKIQPAKLE | |
| (substituted) | DSAVYLCASSTGGGRHQPQHFGDGTRLSILEDLRNVTPPKVSLFEPSKAEIA | |
| | NKQKATLVCLARGFFPDHVELSWWVNGKEVHSGVCTDPQAYKESNYSYCLSS | |
| | RLRVSATFWHNPRNHFRCQVQFHGLSEEDKWPEGSPKPVTQNISAEAWGRAD | |
| | CGITSASYQQGVLSATILYEILLGKATLYAVLVSTLVVMAMVKRKNS | |
| β chain with alternative | MHTRLLCWAALCLLGAELTEAGVAQSPRYKIIEKRQSVAFWCNPISGHATLY | 2420 |
| signal peptide, Cβ | WYQQILGQGPKLLIQFQNNGVVDDSQLPKDRFSAERLKGVDSTLKIQPAKLE | |
| (substituted) | DSAVYLCASSTGGGRHQPQHFGDGTRLSILEDLRNVTPPKVSLFEPSKAEIA | |
| | NKQKATLVCLARGFFPDHVELSWWVNGKEVHSGVCTDPQAYKESNYSYCLSS | |
| | RLRVSATFWHNPRNHFRCQVQFHGLSEEDKWPEGSPKPVTQNISAEAWGRAD | |
| | CGITSASYQQGVLSATILYEILLGKATLYAVLVSTLVVMAMVKRKNS | |

[0206] In some embodiments, TCR042 interacts with and/or is specific for p53. In some embodiments, the peptide is from a neoantigen of p53. In some embodiments, the neoantigen has the amino acid change R248Q relative to the wild type p53 sequence. In some embodiments, TCR042 interacts with the neoantigen in the context of HLA-A*02:01, as described in International Publication No. WO 2019/067243, incorporated herein by reference in its entirety.

TABLE 6AQ
Amino acid sequences of TCR043.

| | | SEQ |
|---|---|---|
| | | ID |
| Description | Sequence | NO: |
| CDR1α | ATGYPS | 1421 |
| CDR2α | ATKADDK | 1422 |
| CDR3α | ALSTTGSSNTGKLI | 1423 |
| Vα without signal | NSVTQMEGPVTLSEEAFLTINCTYTATGYPSLFWYVQYPGEGLQLLLKATKA | 1424 |
| peptide (SignalP) | DDKGSNKGFEATYRKETTSFHLEKGSVQVSDSAVYFCALSTTGSSNTGKLIF | |
| | GQGTTLQVKP | |
| Vα without signal | GNSVTQMEGPVTLSEEAFLTINCTYTATGYPSLFWYVQYPGEGLQLLLKATK | 1425 |
| peptide (IMGT) | ADDKGSNKGFEATYRKETTSFHLEKGSVQVSDSAVYFCALSTTGSSNTGKLI | |
| | FGQGTTLQVKP | |
| Vα | MXYSPGLVSLILLLLGRTRGNSVTQMEGPVTLSEEAFLTINCTYTATGYPSL | 1426 |
| | FWYVQYPGEGLQLLLKATKADDKGSNKGFEATYRKETTSFHLEKGSVQVSDS | 1427 |
| | AVYFCALSTTGSSNTGKLIFGQGTTLQVKP | |
| | (X = any amino acid) | |
| α chain with WT signal | MNYSPGLVSLILLLLGRTRGNSVTQMEGPVTLSEEAFLTINCTYTATGYPSL | 1428 |
| peptide, Cα | FWYVQYPGEGLQLLLKATKADDKGSNKGFEATYRKETTSFHLEKGSVQVSDS | |
| (substituted) | AVYFCALSTTGSSNTGKLIFGQGTTLQVKPNIQNPEPAVYQLKDPRSQDSTL | |
| | CLFTDFDSQINVPKTMESGTFITDKCVLDMKAMDSKSNGAIAWSNQTSFTCQ | |
| | DIFKETNATYPSSDVPCDATLTEKSFETDMNLNFQNLLVIVLRILLLKVAGF | |
| | NLLMTLRLWSS | |
| α chain with | MAYSPGLVSLILLLLGRTRGNSVTQMEGPVTLSEEAFLTINCTYTATGYPSL | 1429 |
| alternative signal | FWYVQYPGEGLQLLLKATKADDKGSNKGFEATYRKETTSFHLEKGSVQVSDS | |
| peptide, Cα | AVYFCALSTTGSSNTGKLIFGQGTTLQVKPNIQNPEPAVYQLKDPRSQDSTL | |
| (substituted) | CLFTDFDSQINVPKTMESGTFITDKCVLDMKAMDSKSNGAIAWSNQTSFTCQ | |
| | DIFKETNATYPSSDVPCDATLTEKSFETDMNLNFQNLLVIVLRILLLKVAGF | |
| | NLLMTLRLWSS | |
| α chain with | MHYSPGLVSLILLLLGRTRGNSVTQMEGPVTLSEEAFLTINCTYTATGYPSL | 1430 |
| alternative signal | FWYVQYPGEGLQLLLKATKADDKGSNKGFEATYRKETTSFHLEKGSVQVSDS | |
| peptide, Cα | AVYFCALSTTGSSNTGKLIFGQGTTLQVKPNIQNPEPAVYQLKDPRSQDSTL | |
| (substituted) | CLFTDFDSQINVPKTMESGTFITDKCVLDMKAMDSKSNGAIAWSNQTSFTCQ | |
| | DIFKETNATYPSSDVPCDATLTEKSFETDMNLNFQNLLVIVLRILLLKVAGF | |
| | NLLMTLRLWSS | |
| CDR1β | SGHAT | 2421 |
| CDR2β | FQNNGV | 2422 |
| CDR3β | ASSTGGGRHQPQH | 2423 |
| Vβ without signal | GVAQSPRYKIIEKRQSVAFWCNPISGHATLYWYQQILGQGPKLLIQFQNNGV | 2424 |
| peptide (SignalP) | VDDSQLPKDRFSAERLKGVDSTLKIQPAKLEDSAVYLCASSTGGGRHQPQHF | |
| | GDGTRLSIL | |
| Vβ without signal | EAGVAQSPRYKIIEKRQSVAFWCNPISGHATLYWYQQILGQGPKLLIQFQNN | 2425 |
| peptide (IMGT) | GVVDDSQLPKDRFSAERLKGVDSTLKIQPAKLEDSAVYLCASSTGGGRHQPQ | |
| | HFGDGTRLSIL | |
| Vβ | MXTRLLCWAALCLLGAELTEAGVAQSPRYKIIEKRQSVAFWCNPISGHATLY | 2426 |
| | WYQQILGQGPKLLIQFQNNGVVDDSQLPKDRFSAERLKGVDSTLKIQPAKLE | 2427 |
| | DSAVYLCASSTGGGRHQPQHFGDGTRLSIL | |
| | (X = any amino acid) | |
| β chain with WT signal | MGTRLLCWAALCLLGAELTEAGVAQSPRYKIIEKRQSVAFWCNPISGHATLY | 2428 |
| peptide, Cβ | WYQQILGQGPKLLIQFQNNGVVDDSQLPKDRFSAERLKGVDSTLKIQPAKLE | |
| (substituted) | DSAVYLCASSTGGGRHQPQHFGDGTRLSILEDLRNVTPPKVSLFEPSKAEIA | |
| | NKQKATLVCLARGFFPDHVELSWWVNGKEVHSGVCTDPQAYKESNYSYCLSS | |
| | RLRVSATFWHNPRNHFRCQVQFHGLSEEDKWPEGSPKPVTQNISAEAWGRAD | |
| | CGITSASYQQGVLSATILYEILLGKATLYAVLVSTLVVMAMVKRKNS | |
| β chain with alternative | MATRLLCWAALCLLGAELTEAGVAQSPRYKIIEKRQSVAFWCNPISGHATLY | 2429 |
| signal peptide, Cβ | WYQQILGQGPKLLIQFQNNGVVDDSQLPKDRFSAERLKGVDSTLKIQPAKLE | |
| (substituted) | DSAVYLCASSTGGGRHQPQHFGDGTRLSILEDLRNVTPPKVSLFEPSKAEIA | |
| | NKQKATLVCLARGFFPDHVELSWWVNGKEVHSGVCTDPQAYKESNYSYCLSS | |
| | RLRVSATFWHNPRNHFRCQVQFHGLSEEDKWPEGSPKPVTQNISAEAWGRAD | |
| | CGITSASYQQGVLSATILYEILLGKATLYAVLVSTLVVMAMVKRKNS | |
| β chain with alternative | MHTRLLCWAALCLLGAELTEAGVAQSPRYKIIEKRQSVAFWCNPISGHATLY | 2430 |
| signal peptide, Cβ | WYQQILGQGPKLLIQFQNNGVVDDSQLPKDRFSAERLKGVDSTLKIQPAKLE | |
| (substituted) | DSAVYLCASSTGGGRHQPQHFGDGTRLSILEDLRNVTPPKVSLFEPSKAEIA | |
| | NKQKATLVCLARGFFPDHVELSWWVNGKEVHSGVCTDPQAYKESNYSYCLSS | |
| | RLRVSATFWHNPRNHFRCQVQFHGLSEEDKWPEGSPKPVTQNISAEAWGRAD | |
| | CGITSASYQQGVLSATILYEILLGKATLYAVLVSTLVVMAMVKRKNS | |

[0207] In some embodiments, TCR043 interacts with and/or is specific for p53. In some embodiments, the peptide is from a neoantigen of p53. In some embodiments, the neoantigen has the amino acid change R248Q relative to the wild type p53 sequence. In some embodiments, TCR043 interacts with the neoantigen in the context of HLA-A*02:01, as described in International Publication No. WO 2019/067243, incorporated herein by reference in its entirety.

TABLE 6AR
Amino acid sequences of TCR044.

| | | SEQ |
|---|---|---|
| | | ID |
| Description | Sequence | NO: |
| CDR1α | DRGSQS | 1431 |
| CDR2α | IYSNGD | 1432 |
| CDR3α | AVSWYSTLT | 1433 |
| Vα without signal | QQKEVEQNSGPLSVPEGAIASLNCTYSDRGSQSFFWYRQYSGKSPELIMFIY | 1434 |
| peptide (SignalP) | SNGDKEDGRFTAQLNKASQYVSLLIRDSQPSDSATYLCAVSWYSTLTFGKGT | |
| | MLLVSP | |
| Vα without signal | QKEVEQNSGPLSVPEGAIASLNCTYSDRGSQSFFWYRQYSGKSPELIMFIYS | 1435 |
| peptide (IMGT) | NGDKEDGRFTAQLNKASQYVSLLIRDSQPSDSATYLCAVSWYSTLTFGKGTM | |
| | LLVSP | |
| Vα | MXSLRVLLVILWLQLSWVWSQQKEVEQNSGPLSVPEGAIASLNCTYSDRGSQ | 1436 |
| | SFFWYRQYSGKSPELIMFIYSNGDKEDGRFTAQLNKASQYVSLLIRDSQPSD | 1437 |
| | SATYLCAVSWYSTLTFGKGTMLLVSP | |
| | (X = any amino acid) | |
| α chain with WT signal | MKSLRVLLVILWLQLSWVWSQQKEVEQNSGPLSVPEGAIASLNCTYSDRGSQ | 1438 |
| peptide, Cα | SFFWYRQYSGKSPELIMFIYSNGDKEDGRFTAQLNKASQYVSLLIRDSQPSD | |
| (substituted) | SATYLCAVSWYSTLTFGKGTMLLVSPNIQNPEPAVYQLKDPRSQDSTLCLFT | |
| | DFDSQINVPKTMESGTFITDKCVLDMKAMDSKSNGAIAWSNQTSFTCQDIFK | |
| | ETNATYPSSDVPCDATLTEKSFETDMNLNFQNLLVIVLRILLLKVAGFNLLM | |
| | TLRLWSS | |
| α chain with | MASLRVLLVILWLQLSWVWSQQKEVEQNSGPLSVPEGAIASLNCTYSDRGSQ | 1439 |
| alternative signal | SFFWYRQYSGKSPELIMFIYSNGDKEDGRFTAQLNKASQYVSLLIRDSQPSD | |
| peptide, Cα | SATYLCAVSWYSTLTFGKGTMLLVSPNIQNPEPAVYQLKDPRSQDSTLCLFT | |
| (substituted) | DFDSQINVPKTMESGTFITDKCVLDMKAMDSKSNGAIAWSNQTSFTCQDIFK | |
| | ETNATYPSSDVPCDATLTEKSFETDMNLNFQNLLVIVLRILLLKVAGFNLLM | |
| | TLRLWSS | |
| α chain with | MHSLRVLLVILWLQLSWVWSQQKEVEQNSGPLSVPEGAIASLNCTYSDRGSQ | 1440 |
| alternative signal | SFFWYRQYSGKSPELIMFIYSNGDKEDGRETAQLNKASQYVSLLIRDSQPSD | |
| peptide, Cα | SATYLCAVSWYSTLTFGKGTMLLVSPNIQNPEPAVYQLKDPRSQDSTLCLFT | |
| (substituted) | DFDSQINVPKTMESGTFITDKCVLDMKAMDSKSNGAIAWSNQTSFTCQDIFK | |
| | ETNATYPSSDVPCDATLTEKSFETDMNLNFQNLLVIVLRILLLKVAGFNLLM | |
| | TLRLWSS | |
| CDR1β | WSHSY | 2431 |
| CDR2β | SAAADI | 2432 |
| CDR3β | ASSGSRTDTQY | 2433 |
| Vβ without signal | GITQSPRYKITETGRQVTLMCHQTWSHSYMFWYRQDLGHGLRLIYYSAAADI | 2434 |
| peptide (SignalP) | TDKGEVPDGYVVSRSKTENFPLTLESATRSQTSVYFCASSGSRTDTQYFGPG | |
| | TRLTVL | |
| Vβ without signal | DAGITQSPRYKITETGRQVTLMCHQTWSHSYMFWYRQDLGHGLRLIYYSAAA | 2435 |
| peptide (IMGT) | DITDKGEVPDGYVVSRSKTENFPLTLESATRSQTSVYFCASSGSRTDTQYFG | |
| | PGTRLTVL | |
| Vβ | MXTRLFFYVALCLLWAGHRDAGITQSPRYKITETGRQVTLMCHQTWSHSYMF | 2436 |
| | WYRQDLGHGLRLIYYSAAADITDKGEVPDGYVVSRSKTENFPLTLESATRSQ | 2437 |
| | TSVYFCASSGSRTDTQYFGPGTRLTVL | |
| | (X = any amino acid) | |
| β chain with WT signal | MGTRLFFYVALCLLWAGHRDAGITQSPRYKITETGRQVTLMCHQTWSHSYMF | 2438 |
| peptide, Cβ | WYRQDLGHGLRLIYYSAAADITDKGEVPDGYVVSRSKTENFPLTLESATRSQ | |
| (substituted) | TSVYFCASSGSRTDTQYFGPGTRLTVLEDLRNVTPPKVSLFEPSKAEIANKQ | |
| | KATLVCLARGFFPDHVELSWWVNGKEVHSGVCTDPQAYKESNYSYCLSSRLR | |
| | VSATFWHNPRNHFRCQVQFHGLSEEDKWPEGSPKPVTQNISAEAWGRADCGI | |
| | TSASYQQGVLSATILYEILLGKATLYAVLVSTLVVMAMVKRKNS | |
| β chain with alternative | MATRLFFYVALCLLWAGHRDAGITQSPRYKITETGRQVTLMCHQTWSHSYMF | 2439 |
| signal peptide, Cβ | WYRQDLGHGLRLIYYSAAADITDKGEVPDGYVVSRSKTENFPLTLESATRSQ | |
| (substituted) | TSVYFCASSGSRTDTQYFGPGTRLTVLEDLRNVTPPKVSLFEPSKAEIANKQ | |
| | KATLVCLARGFFPDHVELSWWVNGKEVHSGVCTDPQAYKESNYSYCLSSRLR | |
| | VSATFWHNPRNHFRCQVQFHGLSEEDKWPEGSPKPVTQNISAEAWGRADCGI | |
| | TSASYQQGVLSATILYEILLGKATLYAVLVSTLVVMAMVKRKNS | |
| β chain with alternative | MHTRLFFYVALCLLWAGHRDAGITQSPRYKITETGRQVTLMCHQTWSHSYMF | 2440 |
| signal peptide, Cβ | WYRQDLGHGLRLIYYSAAADITDKGEVPDGYVVSRSKTENFPLTLESATRSQ | |
| (substituted) | TSVYFCASSGSRTDTQYFGPGTRLTVLEDLRNVTPPKVSLFEPSKAEIANKQ | |
| | KATLVCLARGFFPDHVELSWWVNGKEVHSGVCTDPQAYKESNYSYCLSSRLR | |
| | VSATFWHNPRNHFRCQVQFHGLSEEDKWPEGSPKPVTQNISAEAWGRADCGI | |
| | TSASYQQGVLSATILYEILLGKATLYAVLVSTLVVMAMVKRKNS | |

[0208] In some embodiments, TCR044 interacts with and/or is specific for p53. In some embodiments, the peptide is from a neoantigen of p53. In some embodiments, the neoantigen has the amino acid change R248Q relative to the wild type p53 sequence. In some embodiments, TCR044 interacts with the neoantigen in the context of HLA-A*02:01, as described in International Publication No. WO 2019/067243, incorporated herein by reference in its entirety.

TABLE 6AS
Amino acid sequences of TCR045.

| | | SEQ |
|---|---|---|
| | | ID |
| Description | Sequence | NO: |
| CDR1α | SVFSS | 1441 |
| CDR2α | VVTGGEV | 1442 |
| CDR3α | AGEFAGNQFY | 1443 |
| Vα without signal | QLLEQSPQFLSIQEGENLTVYCNSSSVFSSLQWYRQEPGEGPVLLVTVVTGG | 1444 |
| peptide (SignalP) | EVKKLKRLTFQFGDARKDSSLHITAAQPGDTGLYLCAGEFAGNQFYFGTGTS | |
| | LTVIP | |
| Vα without signal | TQLLEQSPQFLSIQEGENLTVYCNSSSVFSSLQWYRQEPGEGPVLLVTVVTG | 1445 |
| peptide (IMGT) | GEVKKLKRLTFQFGDARKDSSLHITAAQPGDTGLYLCAGEFAGNQFYFGTGT | |
| | SLTVIP | |
| Vα | MXLKFSVSILWIQLAWVSTQLLEQSPQFLSIQEGENLTVYCNSSSVFSSLQW | 1446 |
| | YRQEPGEGPVLLVTVVTGGEVKKLKRLTFQFGDARKDSSLHITAAQPGDTGL | 1447 |
| | YLCAGEFAGNQFYFGTGTSLTVIP | |
| | (X = any amino acid) | |
| α chain with WT signal | MVLKFSVSILWIQLAWVSTQLLEQSPQFLSIQEGENLTVYCNSSSVFSSLQW | 1448 |
| peptide, Cα | YRQEPGEGPVLLVTVVTGGEVKKLKRLTFQFGDARKDSSLHITAAQPGDTGL | |
| (substituted) | YLCAGEFAGNQFYFGTGTSLTVIPNIQNPEPAVYQLKDPRSQDSTLCLFTDF | |
| | DSQINVPKTMESGTFITDKCVLDMKAMDSKSNGAIAWSNQTSFTCQDIFKET | |
| | NATYPSSDVPCDATLTEKSFETDMNLNFQNLLVIVLRILLLKVAGFNLLMTL | |
| | RLWSS | |
| α chain with | MALKFSVSILWIQLAWVSTQLLEQSPQFLSIQEGENLTVYCNSSSVFSSLQW | 1449 |
| alternative signal | YRQEPGEGPVLLVTVVTGGEVKKLKRLTFQFGDARKDSSLHITAAQPGDTGL | |
| peptide, Cα | YLCAGEFAGNQFYFGTGTSLTVIPNIQNPEPAVYQLKDPRSQDSTLCLFTDF | |
| (substituted) | DSQINVPKTMESGTFITDKCVLDMKAMDSKSNGAIAWSNQTSFTCQDIFKET | |
| | NATYPSSDVPCDATLTEKSFETDMNLNFQNLLVIVLRILLLKVAGFNLLMTL | |
| | RLWSS | |
| α chain with | MHLKFSVSILWIQLAWVSTQLLEQSPQFLSIQEGENLTVYCNSSSVFSSLQW | 1450 |
| alternative signal | YRQEPGEGPVLLVTVVTGGEVKKLKRLTFQFGDARKDSSLHITAAQPGDTGL | |
| peptide, Cα | YLCAGEFAGNQFYFGTGTSLTVIPNIQNPEPAVYQLKDPRSQDSTLCLFTDF | |
| (substituted) | DSQINVPKTMESGTFITDKCVLDMKAMDSKSNGAIAWSNQTSFTCQDIFKET | |
| | NATYPSSDVPCDATLTEKSFETDMNLNFQNLLVIVLRILLLKVAGFNLLMTL | |
| | RLWSS | |
| CDR1β | MGHRA | 2441 |
| CDR2β | YSYEKL | 2442 |
| CDR3β | ASSQVGLTYEQY | 2443 |
| Vβ without signal | EVTQTPKHLVMGMTNKKSLKCEQHMGHRAMYWYKQKAKKPPELMFVYSYEKL | 2444 |
| peptide (SignalP) | SINESVPSRFSPECPNSSLLNLHLHALQPEDSALYLCASSQVGLTYEQYFGP | |
| | GTRLTVT | |
| Vβ without signal | DTEVTQTPKHLVMGMTNKKSLKCEQHMGHRAMYWYKQKAKKPPELMFVYSYE | 2445 |
| peptide (IMGT) | KLSINESVPSRFSPECPNSSLLNLHLHALQPEDSALYLCASSQVGLTYEQYF | |
| | GPGTRLTVT | |
| Vβ | MXCRLLCCAVLCLLGAVPIDTEVTQTPKHLVMGMTNKKSLKCEQHMGHRAMY | 2446 |
| | WYKQKAKKPPELMFVYSYEKLSINESVPSRFSPECPNSSLLNLHLHALQPED | 2447 |
| | SALYLCASSQVGLTYEQYFGPGTRLTVT | |
| | (X = any amino acid) | |
| β chain with WT signal | MGCRLLCCAVLCLLGAVPIDTEVTQTPKHLVMGMTNKKSLKCEQHMGHRAMY | 2448 |
| peptide, Cβ | WYKQKAKKPPELMFVYSYEKLSINESVPSRFSPECPNSSLLNLHLHALQPED | |
| (substituted) | SALYLCASSQVGLTYEQYFGPGTRLTVTEDLRNVTPPKVSLFEPSKAEIANK | |
| | QKATLVCLARGFFPDHVELSWWVNGKEVHSGVCTDPQAYKESNYSYCLSSRL | |
| | RVSATFWHNPRNHFRCQVQFHGLSEEDKWPEGSPKPVTQNISAEAWGRADCG | |
| | ITSASYQQGVLSATILYEILLGKATLYAVLVSTLVVMAMVKRKNS | |
| β chain with alternative | MACRLLCCAVLCLLGAVPIDTEVTQTPKHLVMGMTNKKSLKCEQHMGHRAMY | 2449 |
| signal peptide, Cβ | WYKQKAKKPPELMFVYSYEKLSINESVPSRFSPECPNSSLLNLHLHALQPED | |
| (substituted) | SALYLCASSQVGLTYEQYFGPGTRLTVTEDLRNVTPPKVSLFEPSKAEIANK | |
| | QKATLVCLARGFFPDHVELSWWVNGKEVHSGVCTDPQAYKESNYSYCLSSRL | |
| | RVSATFWHNPRNHFRCQVQFHGLSEEDKWPEGSPKPVTQNISAEAWGRADCG | |
| | ITSASYQQGVLSATILYEILLGKATLYAVLVSTLVVMAMVKRKNS | |
| β chain with alternative | MHCRLLCCAVLCLLGAVPIDTEVTQTPKHLVMGMTNKKSLKCEQHMGHRAMY | 2450 |
| signal peptide, Cβ | WYKQKAKKPPELMFVYSYEKLSINESVPSRFSPECPNSSLLNLHLHALQPED | |
| (substituted) | SALYLCASSQVGLTYEQYFGPGTRLTVTEDLRNVTPPKVSLFEPSKAEIANK | |
| | QKATLVCLARGFFPDHVELSWWVNGKEVHSGVCTDPQAYKESNYSYCLSSRL | |
| | RVSATFWHNPRNHFRCQVQFHGLSEEDKWPEGSPKPVTQNISAEAWGRADCG | |
| | ITSASYQQGVLSATILYEILLGKATLYAVLVSTLVVMAMVKRKNS | |

[0209] In some embodiments, TCR045 interacts with and/or is specific for p53. In some embodiments, the peptide is from a neoantigen of p53. In some embodiments, the neoantigen has the amino acid change R248Q relative to the wild type p53 sequence. In some embodiments, TCR045 interacts with the neoantigen in the context of HLA-A*02:01, as described in International Publication No. WO 2019/067243, incorporated herein by reference in its entirety.

TABLE 6AT
Amino acid sequences of TCR046.

| | | SEQ |
|---|---|---|
| | | ID |
| Description | Sequence | NO: |
| CDR1α | VSGNPY | 1451 |
| CDR2α | YITGDNLV | 1452 |
| CDR3α | AVRDNSGGSNYKLT | 1453 |
| Vα without signal | QSVAQPEDQVNVAEGNPLTVKCTYSVSGNPYLFWYVQYPNRGLQFLLKYITG | 1454 |
| peptide (SignalP) | DNLVKGSYGFEAEFNKSQTSFHLKKPSALVSDSALYFCAVRDNSGGSNYKLT | |
| | FGKGTLLTVNP | |
| Vα without signal | AQSVAQPEDQVNVAEGNPLTVKCTYSVSGNPYLFWYVQYPNRGLQFLLKYIT | 1455 |
| peptide (IMGT) | GDNLVKGSYGFEAEFNKSQTSFHLKKPSALVSDSALYFCAVRDNSGGSNYKL | |
| | TFGKGTLLTVNP | |
| Vα | MXSAPISMLAMLFTLSGLRAQSVAQPEDQVNVAEGNPLTVKCTYSVSGNPYL | 1456 |
| | FWYVQYPNRGLQFLLKYITGDNLVKGSYGFEAEFNKSQTSFHLKKPSALVSD | |
| | SALYFCAVRDNSGGSNYKLTFGKGTLLTVNP | 1457 |
| | (X = any amino acid) | |
| α chain with WT signal | MASAPISMLAMLFTLSGLRAQSVAQPEDQVNVAEGNPLTVKCTYSVSGNPYL | 1458 |
| peptide, Cα | FWYVQYPNRGLQFLLKYITGDNLVKGSYGFEAEFNKSQTSFHLKKPSALVSD | |
| (substituted) | SALYFCAVRDNSGGSNYKLTFGKGTLLTVNPNIQNPEPAVYQLKDPRSQDST | |
| | LCLFTDFDSQINVPKTMESGTFITDKCVLDMKAMDSKSNGAIAWSNQTSFTC | 1459 |
| | QDIFKETNATYPSSDVPCDATLTEKSFETDMNLNFQNLLVIVLRILLLKVAG | |
| | FNLLMTLRLWSS | |
| α chain with | MHSAPISMLAMLFTLSGLRAQSVAQPEDQVNVAEGNPLTVKCTYSVSGNPYL | 1460 |
| alternative signal | FWYVQYPNRGLQFLLKYITGDNLVKGSYGFEAEFNKSQTSFHLKKPSALVSD | |
| peptide, Cα | SALYFCAVRDNSGGSNYKLTFGKGTLLTVNPNIQNPEPAVYQLKDPRSQDST | |
| (substituted) | LCLFTDFDSQINVPKTMESGTFITDKCVLDMKAMDSKSNGAIAWSNQTSFTC | |
| | QDIFKETNATYPSSDVPCDATLTEKSFETDMNLNFQNLLVIVLRILLLKVAG | |
| | FNLLMTLRLWSS | |
| CDR1β | SGHAT | 2451 |
| CDR2β | FQNNGV | 2452 |
| CDR3β | ASSLGQGQTQY | 2453 |
| Vβ without signal | GVAQSPRYKIIEKRQSVAFWCNPISGHATLYWYQQILGQGPKLLIQFQNNGV | 2454 |
| peptide (SignalP) | VDDSQLPKDRFSAERLKGVDSTLKIQPAKLEDSAVYLCASSLGQGQTQYFGP | |
| | GTRLLVL | |
| Vβ without signal | EAGVAQSPRYKIIEKRQSVAFWCNPISGHATLYWYQQILGQGPKLLIQFQNN | 2455 |
| peptide (IMGT) | GVVDDSQLPKDRFSAERLKGVDSTLKIQPAKLEDSAVYLCASSLGQGQTQYF | |
| | GPGTRLLVL | |
| Vβ | MXTRLLCWAALCLLGAELTEAGVAQSPRYKIIEKRQSVAFWCNPISGHATLY | 2456 |
| | WYQQILGQGPKLLIQFQNNGVVDDSQLPKDRFSAERLKGVDSTLKIQPAKLE | |
| | DSAVYLCASSLGQGQTQYFGPGTRLLVL | 2457 |
| | (X = any amino acid) | |
| β chain with WT signal | MGTRLLCWAALCLLGAELTEAGVAQSPRYKIIEKRQSVAFWCNPISGHATLY | 2458 |
| peptide, Cβ | WYQQILGQGPKLLIQFQNNGVVDDSQLPKDRFSAERLKGVDSTLKIQPAKLE | |
| (substituted) | DSAVYLCASSLGQGQTQYFGPGTRLLVLEDLRNVTPPKVSLFEPSKAEIANK | |
| | QKATLVCLARGFFPDHVELSWWVNGKEVHSGVCTDPQAYKESNYSYCLSSRL | |
| | RVSATFWHNPRNHFRCQVQFHGLSEEDKWPEGSPKPVTQNISAEAWGRADCG | |
| | ITSASYQQGVLSATILYEILLGKATLYAVLVSTLVVMAMVKRKNS | |
| β chain with alternative | MATRLLCWAALCLLGAELTEAGVAQSPRYKIIEKRQSVAFWCNPISGHATLY | 2459 |
| signal peptide, Cβ | WYQQILGQGPKLLIQFQNNGVVDDSQLPKDRFSAERLKGVDSTLKIQPAKLE | |
| (substituted) | DSAVYLCASSLGQGQTQYFGPGTRLLVLEDLRNVTPPKVSLFEPSKAEIANK | |
| | QKATLVCLARGFFPDHVELSWWVNGKEVHSGVCTDPQAYKESNYSYCLSSRL | |
| | RVSATFWHNPRNHFRCQVQFHGLSEEDKWPEGSPKPVTQNISAEAWGRADCG | |
| | ITSASYQQGVLSATILYEILLGKATLYAVLVSTLVVMAMVKRKNS | |
| β chain with alternative | MHTRLLCWAALCLLGAELTEAGVAQSPRYKIIEKRQSVAFWCNPISGHATLY | 2460 |
| signal peptide, Cβ | WYQQILGQGPKLLIQFQNNGVVDDSQLPKDRFSAERLKGVDSTLKIQPAKLE | |
| (substituted) | DSAVYLCASSLGQGQTQYFGPGTRLLVLEDLRNVTPPKVSLFEPSKAEIANK | |
| | QKATLVCLARGFFPDHVELSWWVNGKEVHSGVCTDPQAYKESNYSYCLSSRL | |
| | RVSATFWHNPRNHFRCQVQFHGLSEEDKWPEGSPKPVTQNISAEAWGRADCG | |
| | ITSASYQQGVLSATILYEILLGKATLYAVLVSTLVVMAMVKRKNS | |

[0210] In some embodiments, TCR046 interacts with and/or is specific for p53. In some embodiments, the peptide is from a neoantigen of p53. In some embodiments, the neoantigen has the amino acid change R248Q relative to the wild type p53 sequence. In some embodiments, TCR046 interacts with the neoantigen in the context of HLA-A*02:01, as described in International Publication No. WO 2019/067243, incorporated herein by reference in its entirety.

TABLE 6AU
Amino acid sequences of TCR047.

| | | SEQ |
|---|---|---|
| | | ID |
| Description | Sequence | NO: |
| CDR1α | SSVSVY | 1461 |
| CDR2α | YLSGSTLV | 1462 |
| CDR3α | AVRGSSGTYKYI | 1463 |
| Vα without signal | QSVTQLDSQVPVFEEAPVELRCNYSSSVSVYLFWYVQYPNQGLQLLLKYLSG | 1464 |
| peptide (SignalP) | STLVESINGFEAEFNKSQTSFHLRKPSVHISDTAEYFCAVRGSSGTYKYIFG | |
| | TGTRLKVLA | |
| Vα without signal | AQSVTQLDSQVPVFEEAPVELRCNYSSSVSVYLFWYVQYPNQGLQLLLKYLS | 1465 |
| peptide (IMGT) | GSTLVESINGFEAEFNKSQTSFHLRKPSVHISDTAEYFCAVRGSSGTYKYIF | |
| | GTGTRLKVLA | |
| Vα | MXLLLVPAFQVIFTLGGTRAQSVTQLDSQVPVFEEAPVELRCNYSSSVSVYL | 1466 |
| | FWYVQYPNQGLQLLLKYLSGSTLVESINGFEAEFNKSQTSFHLRKPSVHISD | 1467 |
| | TAEYFCAVRGSSGTYKYIFGTGTRLKVLA | |
| | (X = any amino acid) | |
| α chain with WT signal | MLLLLVPAFQVIFTLGGTRAQSVTQLDSQVPVFEEAPVELRCNYSSSVSVYL | 1468 |
| peptide, Cα | FWYVQYPNQGLQLLLKYLSGSTLVESINGFEAEFNKSQTSFHLRKPSVHISD | |
| (substituted) | TAEYFCAVRGSSGTYKYIFGTGTRLKVLANIQNPEPAVYQLKDPRSQDSTLC | |
| | LFTDFDSQINVPKTMESGTFITDKCVLDMKAMDSKSNGAIAWSNQTSFTCQD | |
| | IFKETNATYPSSDVPCDATLTEKSFETDMNLNFQNLLVIVLRILLLKVAGFN | |
| | LLMTLRLWSS | |
| α chain with | MALLLVPAFQVIFTLGGTRAQSVTQLDSQVPVFEEAPVELRCNYSSSVSVYL | 1469 |
| alternative signal | FWYVQYPNQGLQLLLKYLSGSTLVESINGFEAEFNKSQTSFHLRKPSVHISD | |
| peptide, Cα | TAEYFCAVRGSSGTYKYIFGTGTRLKVLANIQNPEPAVYQLKDPRSQDSTLC | |
| (substituted) | LFTDFDSQINVPKTMESGTFITDKCVLDMKAMDSKSNGAIAWSNQTSFTCQD | |
| | IFKETNATYPSSDVPCDATLTEKSFETDMNLNFQNLLVIVLRILLLKVAGEN | |
| | LLMTLRLWSS | |
| α chain with | MHLLLVPAFQVIFTLGGTRAQSVTQLDSQVPVFEEAPVELRCNYSSSVSVYL | 1470 |
| alternative signal | FWYVQYPNQGLQLLLKYLSGSTLVESINGFEAEFNKSQTSFHLRKPSVHISD | |
| peptide, Cα | TAEYFCAVRGSSGTYKYIFGTGTRLKVLANIQNPEPAVYQLKDPRSQDSTLC | |
| (substituted) | LFTDFDSQINVPKTMESGTFITDKCVLDMKAMDSKSNGAIAWSNQTSFTCQD | |
| | IFKETNATYPSSDVPCDATLTEKSFETDMNLNFQNLLVIVLRILLLKVAGFN | |
| | LLMTLRLWSS | |
| CDR1β | MDHEN | 2461 |
| CDR2β | SYDVKM | 2462 |
| CDR3β | ASKGDQNTEAF | 2463 |
| Vβ without signal | SRYLVKRTGEKVFLECVQDMDHENMFWYRQDPGLGLRLIYFSYDVKMKEKGD | 2464 |
| peptide (SignalP) | IPEGYSVSREKKERFSLILESASTNQTSMYLCASKGDQNTEAFFGQGTRLTV | |
| | V | |
| Vβ without signal | DVKVTQSSRYLVKRTGEKVFLECVQDMDHENMFWYRQDPGLGLRLIYFSYDV | 2465 |
| peptide (IMGT) | KMKEKGDIPEGYSVSREKKERFSLILESASTNQTSMYLCASKGDQNTEAFFG | |
| | QGTRLTVV | |
| Vβ | MXIRLLCRVAFCFLAVGLVDVKVTQSSRYLVKRTGEKVFLECVQDMDHENMF | 2466 |
| | WYRQDPGLGLRLIYFSYDVKMKEKGDIPEGYSVSREKKERFSLILESASTNQ | 2467 |
| | TSMYLCASKGDQNTEAFFGQGTRLTVV | |
| | (X = any amino acid) | |
| β chain with WT signal | MGIRLLCRVAFCFLAVGLVDVKVTQSSRYLVKRTGEKVFLECVQDMDHENMF | 2468 |
| peptide, Cβ | WYRQDPGLGLRLIYFSYDVKMKEKGDIPEGYSVSREKKERFSLILESASTNQ | |
| (substituted) | TSMYLCASKGDQNTEAFFGQGTRLTVVEDLRNVTPPKVSLFEPSKAEIANKQ | |
| | KATLVCLARGFFPDHVELSWWVNGKEVHSGVCTDPQAYKESNYSYCLSSRLR | |
| | VSATFWHNPRNHFRCQVQFHGLSEEDKWPEGSPKPVTQNISAEAWGRADCGI | |
| | TSASYQQGVLSATILYEILLGKATLYAVLVSTLVVMAMVKRKNS | |
| β chain with alternative | MAIRLLCRVAFCFLAVGLVDVKVTQSSRYLVKRTGEKVFLECVQDMDHENMF | 2469 |
| signal peptide, Cβ | WYRQDPGLGLRLIYFSYDVKMKEKGDIPEGYSVSREKKERFSLILESASTNQ | |
| (substituted) | TSMYLCASKGDQNTEAFFGQGTRLTVVEDLRNVTPPKVSLFEPSKAEIANKQ | |
| | KATLVCLARGFFPDHVELSWWVNGKEVHSGVCTDPQAYKESNYSYCLSSRLR | |
| | VSATFWHNPRNHERCQVQFHGLSEEDKWPEGSPKPVTQNISAEAWGRADCGI | |
| | TSASYQQGVLSATILYEILLGKATLYAVLVSTLVVMAMVKRKNS | |
| β chain with alternative | MHIRLLCRVAFCFLAVGLVDVKVTQSSRYLVKRTGEKVFLECVQDMDHENMF | 2470 |
| signal peptide, Cβ | WYRQDPGLGLRLIYFSYDVKMKEKGDIPEGYSVSREKKERFSLILESASTNQ | |
| (substituted) | TSMYLCASKGDQNTEAFFGQGTRLTVVEDLRNVTPPKVSLFEPSKAEIANKQ | |
| | KATLVCLARGFFPDHVELSWWVNGKEVHSGVCTDPQAYKESNYSYCLSSRLR | |
| | VSATFWHNPRNHFRCQVQFHGLSEEDKWPEGSPKPVTQNISAEAWGRADCGI | |
| | TSASYQQGVLSATILYEILLGKATLYAVLVSTLVVMAMVKRKNS | |

[0211] In some embodiments, TCR047 interacts with and/or is specific for p53. In some embodiments, the peptide is from a neoantigen of p53. In some embodiments, the neoantigen has the amino acid change R248Q relative to the wild type p53 sequence. In some embodiments, TCR047 interacts with the neoantigen in the context of HLA-A*02:01, as described in International Publication No. WO 2019/067243, incorporated herein by reference in its entirety.

TABLE 6AV
Amino acid sequences of TCR048.

| | | SEQ |
|---|---|---|
| | | ID |
| Description | Sequence | NO: |
| CDR1α | TSGFNG | 1471 |
| CDR2α | NVLDGL | 1472 |
| CDR3α | AVRDLQTGANNLF | 1473 |
| Vα without signal | QNIDQPTEMTATEGAIVQINCTYQTSGFNGLFWYQQHAGEAPTFLSYNVLDG | 1474 |
| peptide (SignalP) | LEEKGRFSSFLSRSKGYSYLLLKELQMKDSASYLCAVRDLQTGANNLFFGTG | |
| | TRLTVIP | |
| Vα without signal | GQNIDQPTEMTATEGAIVQINCTYQTSGFNGLFWYQQHAGEAPTFLSYNVLD | 1475 |
| peptide (IMGT) | GLEEKGRFSSFLSRSKGYSYLLLKELQMKDSASYLCAVRDLQTGANNLFFGT | |
| | GTRLTVIP | |
| Vα | MXGVFLLYVSMKMGGTTGQNIDQPTEMTATEGAIVQINCTYQTSGFNGLFWY | 1476 |
| | QQHAGEAPTFLSYNVLDGLEEKGRFSSFLSRSKGYSYLLLKELQMKDSASYL | 1477 |
| | CAVRDLQTGANNLFFGTGTRLTVIP | |
| | (X = any amino acid) | |
| α chain with WT signal | MWGVFLLYVSMKMGGTTGQNIDQPTEMTATEGAIVQINCTYQTSGFNGLFWY | 1478 |
| peptide, Cα | QQHAGEAPTFLSYNVLDGLEEKGRFSSFLSRSKGYSYLLLKELQMKDSASYL | |
| (substituted) | CAVRDLQTGANNLFFGTGTRLTVIPNIQNPEPAVYQLKDPRSQDSTLCLFTD | |
| | FDSQINVPKTMESGTFITDKCVLDMKAMDSKSNGAIAWSNQTSFTCQDIFKE | |
| | TNATYPSSDVPCDATLTEKSFETDMNLNFQNLLVIVLRILLLKVAGFNLLMT | |
| | LRLWSS | |
| α chain with | MAGVFLLYVSMKMGGTTGQNIDQPTEMTATEGAIVQINCTYQTSGFNGLFWY | 1479 |
| alternative signal | QQHAGEAPTFLSYNVLDGLEEKGRFSSFLSRSKGYSYLLLKELQMKDSASYL | |
| peptide, Cα | CAVRDLQTGANNLFFGTGTRLTVIPNIQNPEPAVYQLKDPRSQDSTLCLFTD | |
| (substituted) | FDSQINVPKTMESGTFITDKCVLDMKAMDSKSNGAIAWSNQTSFTCQDIFKE | |
| | TNATYPSSDVPCDATLTEKSFETDMNLNFQNLLVIVLRILLLKVAGFNLLMT | |
| | LRLWSS | |
| α chain with | MHGVFLLYVSMKMGGTTGQNIDQPTEMTATEGAIVQINCTYQTSGFNGLFWY | 1480 |
| alternative signal | QQHAGEAPTFLSYNVLDGLEEKGRFSSFLSRSKGYSYLLLKELQMKDSASYL | |
| peptide, Cα | CAVRDLQTGANNLFFGTGTRLTVIPNIQNPEPAVYQLKDPRSQDSTLCLFTD | |
| (substituted) | FDSQINVPKTMESGTFITDKCVLDMKAMDSKSNGAIAWSNQTSFTCQDIFKE | |
| | TNATYPSSDVPCDATLTEKSFETDMNLNFQNLLVIVLRILLLKVAGFNLLMT | |
| | LRLWSS | |
| CDR1β | MDHEN | 2471 |
| CDR2β | SYDVKM | 2472 |
| CDR3β | ASSLTFGTTEAF | 2473 |
| Vβ without signal | SRYLVKRTGEKVFLECVQDMDHENMFWYRQDPGLGLRLIYFSYDVKMKEKGD | 2474 |
| peptide (SignalP) | IPEGYSVSREKKERFSLILESASTNQTSMYLCASSLTFGTTEAFFGQGTRLT | |
| | VV | |
| Vβ without signal | DVKVTQSSRYLVKRTGEKVFLECVQDMDHENMFWYRQDPGLGLRLIYFSYDV | 2475 |
| peptide (IMGT) | KMKEKGDIPEGYSVSREKKERFSLILESASTNQTSMYLCASSLTFGTTEAFF | |
| | GQGTRLTVV | |
| Vβ | MXIRLLCRVAFCFLAVGLVDVKVTQSSRYLVKRTGEKVFLECVQDMDHENMF | 2476 |
| | WYRQDPGLGLRLIYFSYDVKMKEKGDIPEGYSVSREKKERFSLILESASTNQ | 2477 |
| | TSMYLCASSLTFGTTEAFFGQGTRLTVV | |
| | (X = any amino acid) | |
| β chain with WT signal | MGIRLLCRVAFCFLAVGLVDVKVTQSSRYLVKRTGEKVFLECVQDMDHENMF | 2478 |
| peptide, Cβ | WYRQDPGLGLRLIYFSYDVKMKEKGDIPEGYSVSREKKERFSLILESASTNQ | |
| (substituted) | TSMYLCASSLTFGTTEAFFGQGTRLTVVEDLRNVTPPKVSLFEPSKAEIANK | |
| | QKATLVCLARGFFPDHVELSWWVNGKEVHSGVCTDPQAYKESNYSYCLSSRL | |
| | RVSATFWHNPRNHFRCQVQFHGLSEEDKWPEGSPKPVTQNISAEAWGRADCG | |
| | ITSASYQQGVLSATILYEILLGKATLYAVLVSTLVVMAMVKRKNS | |
| β chain with alternative | MAIRLLCRVAFCFLAVGLVDVKVTQSSRYLVKRTGEKVFLECVQDMDHENMF | 2479 |
| signal peptide, Cβ | WYRQDPGLGLRLIYFSYDVKMKEKGDIPEGYSVSREKKERFSLILESASTNQ | |
| (substituted) | TSMYLCASSLTFGTTEAFFGQGTRLTVVEDLRNVTPPKVSLFEPSKAEIANK | |
| | QKATLVCLARGFFPDHVELSWWVNGKEVHSGVCTDPQAYKESNYSYCLSSRL | |
| | RVSATFWHNPRNHFRCQVQFHGLSEEDKWPEGSPKPVTQNISAEAWGRADCG | |
| | ITSASYQQGVLSATILYEILLGKATLYAVLVSTLVVMAMVKRKNS | |
| β chain with alternative | MHIRLLCRVAFCFLAVGLVDVKVTQSSRYLVKRTGEKVFLECVQDMDHENMF | 2480 |
| signal peptide, Cβ | WYRQDPGLGLRLIYFSYDVKMKEKGDIPEGYSVSREKKERFSLILESASTNQ | |
| (substituted) | TSMYLCASSLTFGTTEAFFGQGTRLTVVEDLRNVTPPKVSLFEPSKAEIANK | |
| | QKATLVCLARGFFPDHVELSWWVNGKEVHSGVCTDPQAYKESNYSYCLSSRL | |
| | RVSATFWHNPRNHFRCQVQFHGLSEEDKWPEGSPKPVTQNISAEAWGRADCG | |
| | ITSASYQQGVLSATILYEILLGKATLYAVLVSTLVVMAMVKRKNS | |

[0212] In some embodiments, TCR048 interacts with and/or is specific for p53. In some embodiments, the peptide is from a neoantigen of p53. In some embodiments, the neoantigen has the amino acid change R248Q relative to the wild type p53 sequence. In some embodiments, TCR048 interacts with the neoantigen in the context of HLA-A*02:01, as described in International Publication No. WO 2019/067243, incorporated herein by reference in its entirety.

TABLE 6AW
Amino acid sequences of TCR049.

| | | SEQ |
|---|---|---|
| | | ID |
| Description | Sequence | NO: |
| CDR1α | TSGENG | 1481 |
| CDR2α | NVLDGL | 1482 |
| CDR3α | AFYYGGSQGNLI | 1483 |
| Vα without | QNIDQPTEMTATEGAIVQINCTYQTSGENGLFWYQQHAGEAPTFLSYNVLDG | 1484 |
| signal peptide | LEEKGRFSSFLSRSKGYSYLLLKELQMKDSASYLCAFYYGGSQGNLIFGKGT | |
| (SignalP) | KLSVKP | |
| Vα without | GQNIDQPTEMTATEGAIVQINCTYQTSGENGLFWYQQHAGEAPTFLSYNVLD | 1485 |
| signal peptide | GLEEKGRFSSFLSRSKGYSYLLLKELQMKDSASYLCAFYYGGSQGNLIFGKG | |
| (IMGT) | TKLSVKP | |
| Vα | MXGVFLLYVSMKMGGTTGQNIDQPTEMTATEGAIVQINCTYQTSGENGLFWY | 1486 |
| | QQHAGEAPTFLSYNVLDGLEEKGRESSFLSRSKGYSYLLLKELQMKDSASYL | 1487 |
| | CAFYYGGSQGNLIFGKGTKLSVKP | |
| | (X = any amino acid) | |
| α chain with | MWGVFLLYVSMKMGGTTGQNIDQPTEMTATEGAIVQINCTYQTSGENGLEWY | 1488 |
| WT signal | QQHAGEAPTFLSYNVLDGLEEKGRFSSFLSRSKGYSYLLLKELQMKDSASYL | |
| peptide, Cα | CAFYYGGSQGNLIFGKGTKLSVKPNIQNPEPAVYQLKDPRSQDSTLCLFTDF | |
| (substituted) | DSQINVPKTMESGTFITDKCVLDMKAMDSKSNGAIAWSNQTSFTCQDIFKET | |
| | NATYPSSDVPCDATLTEKSFETDMNLNFQNLLVIVLRILLLKVAGENLLMTL | |
| | RLWSS | |
| α chain with | MAGVFLLYVSMKMGGTTGQNIDQPTEMTATEGAIVQINCTYQTSGENGLFWY | 1489 |
| alternative | QQHAGEAPTFLSYNVLDGLEEKGRESSFLSRSKGYSYLLLKELQMKDSASYL | |
| signal peptide, | CAFYYGGSQGNLIFGKGTKLSVKPNIQNPEPAVYQLKDPRSQDSTLCLFTDE | |
| Cα | DSQINVPKTMESGTFITDKCVLDMKAMDSKSNGAIAWSNQTSFTCQDIFKET | |
| (substituted) | NATYPSSDVPCDATLTEKSFETDMNLNFQNLLVIVLRILLLKVAGENLLMTL | |
| | RLWSS | |
| α chain with | MHGVFLLYVSMKMGGTTGQNIDQPTEMTATEGAIVQINCTYQTSGFNGLFWY | 1490 |
| alternative | QQHAGEAPTFLSYNVLDGLEEKGRESSFLSRSKGYSYLLLKELQMKDSASYL | |
| signal peptide, | CAFYYGGSQGNLIFGKGTKLSVKPNIQNPEPAVYQLKDPRSQDSTLCLFTDE | |
| Cα | DSQINVPKTMESGTFITDKCVLDMKAMDSKSNGAIAWSNQTSFTCQDIFKET | |
| (substituted) | NATYPSSDVPCDATLTEKSFETDMNLNFQNLLVIVLRILLLKVAGENLLMTL | |
| | RLWSS | |
| CDR1β | SGHVS | 2481 |
| CDR2β | FQNEAQ | 2482 |
| CDR3β | ASSFGSGSTDTQY | 2483 |
| Vβ without | GVSQSPRYKVAKRGQDVALRCDPISGHVSLFWYQQALGQGPEFLTYFQNEAQ | 2484 |
| signal peptide) | LDKSGLPSDRFFAERPEGSVSTLKIQRTQQEDSAVYLCASSFGSGSTDTQYF | |
| (SignalP | GPGTRLTVL | |
| Vβ without | GAGVSQSPRYKVAKRGQDVALRCDPISGHVSLFWYQQALGQGPEFLTYFQNE | 2485 |
| signal peptide | AQLDKSGLPSDRFFAERPEGSVSTLKIQRTQQEDSAVYLCASSFGSGSTDTQ | |
| (IMGT) | YFGPGTRLTVL | |
| Vβ | MXTRLLCWVVLGFLGTDHTGAGVSQSPRYKVAKRGQDVALRCDPISGHVSLF | 2486 |
| | WYQQALGQGPEFLTYFQNEAQLDKSGLPSDRFFAERPEGSVSTLKIQRTQQE | 2487 |
| | DSAVYLCASSFGSGSTDTQYFGPGTRLTVL | |
| | (X = any amino acid) | |
| β chain with | MGTRLLCWVVLGFLGTDHTGAGVSQSPRYKVAKRGQDVALRCDPISGHVSLF | 2488 |
| WT signal | WYQQALGQGPEFLTYFQNEAQLDKSGLPSDRFFAERPEGSVSTLKIQRTQQE | |
| peptide, Cβ | DSAVYLCASSFGSGSTDTQYFGPGTRLTVLEDLRNVTPPKVSLFEPSKAEIA | |
| (substituted) | NKQKATLVCLARGFFPDHVELSWWVNGKEVHSGVCTDPQAYKESNYSYCLSS | |
| | RLRVSATFWHNPRNHFRCQVQFHGLSEEDKWPEGSPKPVTQNISAEAWGRAD | |
| | CGITSASYQQGVLSATILYEILLGKATLYAVLVSTLVVMAMVKRKNS | |
| β chain with | MATRLLCWVVLGFLGTDHTGAGVSQSPRYKVAKRGQDVALRCDPISGHVSLF | 2489 |
| alternative | WYQQALGQGPEFLTYFQNEAQLDKSGLPSDRFFAERPEGSVSTLKIQRTQQE | |
| signal peptide, | DSAVYLCASSFGSGSTDTQYFGPGTRLTVLEDLRNVTPPKVSLFEPSKAEIA | |
| Cβ | NKQKATLVCLARGFFPDHVELSWWVNGKEVHSGVCTDPQAYKESNYSYCLSS | |
| (substituted) | RLRVSATFWHNPRNHFRCQVQFHGLSEEDKWPEGSPKPVTQNISAEAWGRAD | |
| | CGITSASYQQGVLSATILYEILLGKATLYAVLVSTLVVMAMVKRKNS | |
| β chain with | MHTRLLCWVVLGFLGTDHTGAGVSQSPRYKVAKRGQDVALRCDPISGHVSLF | 2490 |
| alternative | WYQQALGQGPEFLTYFQNEAQLDKSGLPSDRFFAERPEGSVSTLKIQRTQQE | |
| signal peptide, | DSAVYLCASSFGSGSTDTQYFGPGTRLTVLEDLRNVTPPKVSLFEPSKAEIA | |
| Cβ | NKQKATLVCLARGFFPDHVELSWWVNGKEVHSGVCTDPQAYKESNYSYCLSS | |
| (substituted) | RLRVSATFWHNPRNHFRCQVQFHGLSEEDKWPEGSPKPVTQNISAEAWGRAD | |
| | CGITSASYQQGVLSATILYEILLGKATLYAVLVSTLVVMAMVKRKNS | |

[0213] In some embodiments, TCR049 interacts with and/or is specific for p53. In some embodiments, the peptide is from a neoantigen of p53. In some embodiments, the neoantigen has the amino acid change R248W relative to the wild type p53 sequence. In some embodiments, TCR049 interacts with the neoantigen in the context of HLA-A*68:01, as described in International Publication No. WO 2019/067243, incorporated herein by reference in its entirety.

TABLE 6AX
Amino acid sequences of TCR050.

| | | SEQ |
|---|---|---|
| | | ID |
| Description | Sequence | NO: |
| CDR1α | VTNERS | 1491 |
| CDR2α | LTSSGIE | 1492 |
| CDR3α | AGQNYGGSQGNLI | 1493 |
| Vα without | EDKVVQSPLSLVVHEGDTVTLNCSYEVTNFRSLLWYKQEKKAPTFLFMLTSS | 1494 |
| signal peptide | GIEKKSGRLSSILDKKELSSILNITATQTGDSAIYLCAGONYGGSQGNLIFG | |
| (SignalP) | KGTKLSVKP | |
| Vα without | EDKVVQSPLSLVVHEGDTVTLNCSYEVTNFRSLLWYKQEKKAPTFLEMLTSS | 1495 |
| signal peptide | GIEKKSGRLSSILDKKELSSILNITATQTGDSAIYLCAGQNYGGSQGNLIFG | |
| (IMGT) | KGTKLSVKP | |
| Vα | MXKCPQALLAIFWLLLSWVSSEDKVVQSPLSLVVHEGDTVTLNCSYEVTNER | 1496 |
| | SLLWYKQEKKAPTFLFMLTSSGIEKKSGRLSSILDKKELSSILNITATQTGD | 1497 |
| | SAIYLCAGQNYGGSQGNLIFGKGTKLSVKP | |
| | (X = any amino acid) | |
| α chain with | MMKCPQALLAIFWLLLSWVSSEDKVVQSPLSLVVHEGDTVTLNCSYEVTNER | 1498 |
| WT signal | SLLWYKQEKKAPTFLFMLTSSGIEKKSGRLSSILDKKELSSILNITATQTGD | |
| peptide, Cα | SAIYLCAGQNYGGSQGNLIFGKGTKLSVKPNIQNPEPAVYQLKDPRSQDSTL | |
| (substituted) | CLFTDFDSQINVPKTMESGTFITDKCVLDMKAMDSKSNGAIAWSNQTSFTCQ | |
| | DIFKETNATYPSSDVPCDATLTEKSFETDMNLNFQNLLVIVLRILLLKVAGF | |
| | NLLMTLRLWSS | |
| α chain with | MAKCPQALLAIFWLLLSWVSSEDKVVQSPLSLVVHEGDTVTLNCSYEVTNER | 1499 |
| alternative | SLLWYKQEKKAPTFLFMLTSSGIEKKSGRLSSILDKKELSSILNITATQTGD | |
| signal peptide, | SAIYLCAGONYGGSQGNLIFGKGTKLSVKPNIONPEPAVYQLKDPRSQDSTL | |
| Cα | CLFTDFDSQINVPKTMESGTFITDKCVLDMKAMDSKSNGAIAWSNQTSFTCQ | |
| (substituted) | DIFKETNATYPSSDVPCDATLTEKSFETDMNLNFQNLLVIVLRILLLKVAGE | |
| | NLLMTLRLWSS | |
| α chain with | MHKCPQALLAIFWLLLSWVSSEDKVVQSPLSLVVHEGDTVTLNCSYEVTNER | 1500 |
| alternative | SLLWYKQEKKAPTFLFMLTSSGIEKKSGRLSSILDKKELSSILNITATQTGD | |
| signal peptide, | SAIYLCAGQNYGGSQGNLIFGKGTKLSVKPNIONPEPAVYQLKDPRSQDSTL | |
| Cα | CLFTDFDSQINVPKTMESGTFITDKCVLDMKAMDSKSNGAIAWSNQTSFTCQ | |
| (substituted) | DIFKETNATYPSSDVPCDATLTEKSFETDMNLNFQNLLVIVLRILLLKVAGF | |
| | NLLMTLRLWSS | |
| CDR1β | SNHLY | 2491 |
| CDR2β | FYNNE | 2492 |
| CDR3β | ASRDPAYEQY | 2493 |
| Vβ without | EPEVTQTPSHQVTQMGQEVILRCVPISNHLYFYWYRQILGQKVEFLVSFYNN | 2494 |
| signal peptide | EISEKSEIFDDQFSVERPDGSNFTLKIRSTKLEDSAMYFCASRDPAYEQYFG | |
| (SignalP) | PGTRLTVT | |
| Vβ without | EPEVTQTPSHQVTQMGQEVILRCVPISNHLYFYWYRQILGQKVEFLVSFYNN | 2495 |
| signal peptide | EISEKSEIFDDQFSVERPDGSNFTLKIRSTKLEDSAMYFCASRDPAYEQYFG | |
| (IMGT) | PGTRLTVT | |
| Vβ | MXTWLVCWAIFSLLKAGLTEPEVTQTPSHQVTQMGQEVILRCVPISNHLYFY | 2496 |
| | WYRQILGQKVEFLVSFYNNEISEKSEIFDDQFSVERPDGSNFTLKIRSTKLE | 2497 |
| | DSAMYFCASRDPAYEQYFGPGTRLTVT | |
| | (X = any amino acid) | |
| β chain with | MDTWLVCWAIFSLLKAGLTEPEVTQTPSHQVTOMGQEVILRCVPISNHLYFY | 2498 |
| WT signal | WYRQILGQKVEFLVSFYNNEISEKSEIFDDQFSVERPDGSNFTLKIRSTKLE | |
| peptide, Cβ | DSAMYFCASRDPAYEQYFGPGTRLTVTEDLRNVTPPKVSLFEPSKAEIANKO | |
| (substituted) | KATLVCLARGFFPDHVELSWWVNGKEVHSGVCTDPQAYKESNYSYCLSSRLR | |
| | VSATFWHNPRNHFRCQVQFHGLSEEDKWPEGSPKPVTQNISAEAWGRADCGI | |
| | TSASYQQGVLSATILYEILLGKATLYAVLVSTLVVMAMVKRKNS | |
| β chain with | MATWLVCWAIFSLLKAGLTEPEVTQTPSHQVTOMGQEVILRCVPISNHLYFY | 2499 |
| alternative | WYRQILGQKVEFLVSFYNNEISEKSEIFDDQFSVERPDGSNFTLKIRSTKLE | |
| signal peptide, | DSAMYFCASRDPAYEQYFGPGTRLTVTEDLRNVTPPKVSLFEPSKAEIANKQ | |
| Cβ | KATLVCLARGFFPDHVELSWWVNGKEVHSGVCTDPQAYKESNYSYCLSSRLR | |
| (substituted) | VSATFWHNPRNHFRCQVQFHGLSEEDKWPEGSPKPVTQNISAEAWGRADCGI | |
| | TSASYQQGVLSATILYEILLGKATLYAVLVSTLVVMAMVKRKNS | |
| β chain with | MHTWLVCWAIFSLLKAGLTEPEVTQTPSHQVTQMGQEVILRCVPISNHLYFY | 2500 |
| alternative | WYRQILGQKVEFLVSFYNNEISEKSEIFDDQFSVERPDGSNFTLKIRSTKLE | |
| signal peptide, | DSAMYFCASRDPAYEQYFGPGTRLTVTEDLRNVTPPKVSLFEPSKAEIANKQ | |
| Cβ | KATLVCLARGFFPDHVELSWWVNGKEVHSGVCTDPQAYKESNYSYCLSSRLR | |
| (substituted) | VSATFWHNPRNHFRCQVQFHGLSEEDKWPEGSPKPVTQNISAEAWGRADCGI | |
| | TSASYQQGVLSATILYEILLGKATLYAVLVSTLVVMAMVKRKNS | |

[0214] In some embodiments, TCR050 interacts with and/or is specific for p53. In some embodiments, the peptide is from a neoantigen of p53. In some embodiments, the neoantigen has the amino acid change R248W relative to the wild type p53 sequence. In some embodiments, TCR050 interacts with the neoantigen in the context of HLA-A*02:01, as described in International Publication No. WO 2019/067243, incorporated herein by reference in its entirety.

TABLE 6AY
Amino acid sequences of TCR051.

| | | SEQ |
|---|---|---|
| | | ID |
| Description | Sequence | NO: |
| CDR1α | DRGSQS | 1501 |
| CDR2α | IYSNGD | 1502 |
| CDR3α | AVTLCGGYNKLI | 1503 |
| Vα without | QQKEVEQNSGPLSVPEGAIASLNCTYSDRGSQSFFWYRQYSGKSPELIMFIY | 1504 |
| signal peptide | SNGDKEDGRFTAQLNKASQYVSLLIRDSQPSDSATYLCAVTLCGGYNKLIFG | |
| (SignalP) | AGTRLAVHP | |
| Vα without | QKEVEQNSGPLSVPEGAIASLNCTYSDRGSQSFFWYRQYSGKSPELIMFIYS | 1505 |
| signal peptide | NGDKEDGRFTAQLNKASQYVSLLIRDSQPSDSATYLCAVTLCGGYNKLIFGA | |
| (IMGT) | GTRLAVHP | |
| Vα | MXSLRVLLVILWLQLSWVWSQQKEVEQNSGPLSVPEGAIASLNCTYSDRGSQ | 1506 |
| | SFFWYRQYSGKSPELIMFIYSNGDKEDGRFTAQLNKASQYVSLLIRDSQPSD | 1507 |
| | SATYLCAVTLCGGYNKLIFGAGTRLAVHP | |
| | (X = any amino acid) | |
| α chain with | MKSLRVLLVILWLQLSWVWSQQKEVEQNSGPLSVPEGAIASLNCTYSDRGSQ | 1508 |
| WT signal | SFFWYRQYSGKSPELIMFIYSNGDKEDGRFTAQLNKASQYVSLLIRDSQPSD | |
| peptide, Cα | SATYLCAVTLCGGYNKLIFGAGTRLAVHPNIQNPEPAVYQLKDPRSQDSTLC | |
| (substituted) | LFTDFDSQINVPKTMESGTFITDKCVLDMKAMDSKSNGAIAWSNQTSFTCQD | |
| | IFKETNATYPSSDVPCDATLTEKSFETDMNLNFQNLLVIVLRILLLKVAGEN | |
| | LLMTLRLWSS | |
| α chain with | MASLRVLLVILWLQLSWVWSQQKEVEQNSGPLSVPEGAIASLNCTYSDRGSQ | 1509 |
| alternative | SFFWYRQYSGKSPELIMFIYSNGDKEDGRFTAQLNKASQYVSLLIRDSQPSD | |
| signal peptide, | SATYLCAVTLCGGYNKLIFGAGTRLAVHPNIQNPEPAVYQLKDPRSQDSTLC | |
| Cα | LFTDFDSQINVPKTMESGTFITDKCVLDMKAMDSKSNGAIAWSNQTSFTCQD | |
| (substituted) | IFKETNATYPSSDVPCDATLTEKSFETDMNLNFQNLLVIVLRILLLKVAGEN | |
| | LLMTLRLWSS | |
| α chain with | MHSLRVLLVILWLQLSWVWSQQKEVEQNSGPLSVPEGAIASLNCTYSDRGSQ | 1510 |
| alternative | SFFWYRQYSGKSPELIMFIYSNGDKEDGRFTAQLNKASQYVSLLIRDSQPSD | |
| signal peptide, | SATYLCAVTLCGGYNKLIFGAGTRLAVHPNIQNPEPAVYQLKDPRSQDSTLC | |
| Cα | LFTDFDSQINVPKTMESGTFITDKCVLDMKAMDSKSNGAIAWSNQTSFTCQD | |
| (substituted) | IFKETNATYPSSDVPCDATLTEKSFETDMNLNFQNLLVIVLRILLLKVAGEN | |
| | LLMTLRLWSS | |
| CDR1β | LNHDA | 2501 |
| CDR2β | SQIVND | 2502 |
| CDR3β | ASSSRDYEQY | 2503 |
| Vβ without | GITQSPKYLFRKEGQNVTLSCEQNLNHDAMYWYRQDPGQGLRLIYYSQIVND | 2504 |
| signal peptide | FQKGDIVEGYSVSREKKESFPLTVTSAQKNPTAFYLCASSSRDYEQYFGPGT | |
| (SignalP) | RLTVT | |
| Vβ without | DGGITQSPKYLFRKEGQNVTLSCEQNLNHDAMYWYRQDPGQGLRLIYYSQIV | 2505 |
| signal peptide | NDFQKGDIVEGYSVSREKKESFPLTVTSAQKNPTAFYLCASSSRDYEQYFGP | |
| (IMGT) | GTRLTVT | |
| Vβ | MXNQVLCCVVLCFLGANTVDGGITQSPKYLFRKEGQNVTLSCEQNLNHDAMY | 2506 |
| | WYRQDPGQGLRLIYYSQIVNDFQKGDIVEGYSVSREKKESFPLTVTSAQKNP | 2507 |
| | TAFYLCASSSRDYEQYFGPGTRLTVT | |
| | (X = any amino acid) | |
| β chain with | MSNQVLCCVVLCFLGANTVDGGITQSPKYLFRKEGQNVTLSCEQNLNHDAMY | 2508 |
| WT signal | WYRQDPGQGLRLIYYSQIVNDFQKGDIVEGYSVSREKKESFPLTVTSAQKNP | |
| peptide, Cβ | TAFYLCASSSRDYEQYFGPGTRLTVTEDLRNVTPPKVSLFEPSKAEIANKQK | |
| (substituted) | ATLVCLARGFFPDHVELSWWVNGKEVHSGVCTDPQAYKESNYSYCLSSRLRV | |
| | SATFWHNPRNHFRCQVQFHGLSEEDKWPEGSPKPVTQNISAEAWGRADCGIT | |
| | SASYQQGVLSATILYEILLGKATLYAVLVSTLVVMAMVKRKNS | |
| β chain with | MANQVLCCVVLCFLGANTVDGGITQSPKYLFRKEGQNVTLSCEQNLNHDAMY | 2509 |
| alternative | WYRQDPGQGLRLIYYSQIVNDFQKGDIVEGYSVSREKKESFPLTVTSAQKNP | |
| signal peptide, | TAFYLCASSSRDYEQYFGPGTRLTVTEDLRNVTPPKVSLFEPSKAEIANKQK | |
| Cβ | ATLVCLARGFFPDHVELSWWVNGKEVHSGVCTDPQAYKESNYSYCLSSRLRV | |
| (substituted) | SATFWHNPRNHFRCQVQFHGLSEEDKWPEGSPKPVTQNISAEAWGRADCGIT | |
| | SASYQQGVLSATILYEILLGKATLYAVLVSTLVVMAMVKRKNS | |
| β chain with | MHNQVLCCVVLCFLGANTVDGGITQSPKYLFRKEGQNVTLSCEQNINHDAMY | 2510 |
| alternative | WYRQDPGQGLRLIYYSQIVNDFQKGDIVEGYSVSREKKESFPLTVTSAQKNP | |
| signal peptide, | TAFYLCASSSRDYEQYFGPGTRLTVTEDLRNVTPPKVSLFEPSKAEIANKQK | |
| Cβ | ATLVCLARGFFPDHVELSWWVNGKEVHSGVCTDPQAYKESNYSYCLSSRLRV | |
| (substituted) | SATFWHNPRNHFRCQVQFHGLSEEDKWPEGSPKPVTQNISAEAWGRADCGIT | |
| | SASYQQGVLSATILYEILLGKATLYAVLVSTLVVMAMVKRKNS | |

[0215] In some embodiments, TCR051 interacts with and/or is specific for p53. In some embodiments, the peptide is from a neoantigen of p53. In some embodiments, the neoantigen has the amino acid change R248W relative to the wild type p53 sequence. In some embodiments, TCR051 interacts with the neoantigen in the context of HLA-DPA1*03:01/DPB1*02:01:02, as described in International Publication No. WO 2019/067243, incorporated herein by reference in its entirety.

TABLE 6AZ
Amino acid sequences of TCR052.

| | | SEQ |
|---|---|---|
| | | ID |
| Description | Sequence | NO: |
| CDR1α | SSVSVY | 1511 |
| CDR2α | YLSGSTLV | 1512 |
| CDR3α | AVSDLVRDDKII | 1513 |
| Vα without | QSVTQLDSQVPVFEEAPVELRCNYSSSVSVYLFWYVQYPNQGLQLLLKYLSG | 1514 |
| signal peptide | STLVESINGFEAEFNKSQTSFHLRKPSVHISDTAEYFCAVSDLVRDDKIIFG | |
| (SignalP) | KGTRLHILP | |
| Vα without | AQSVTQLDSQVPVFEEAPVELRCNYSSSVSVYLFWYVQYPNQGLQLLLKYLS | 1515 |
| signal peptide | GSTLVESINGFEAEFNKSQTSFHLRKPSVHISDTAEYFCAVSDLVRDDKIIF | |
| (IMGT) | GKGTRLHILP | |
| Vα | MXLLLVPAFQVIFTLGGTRAQSVTQLDSQVPVFEEAPVELRCNYSSSVSVYL | 1516 |
| | FWYVQYPNQGLQLLLKYLSGSTLVESINGFEAEFNKSQTSFHLRKPSVHISD | 1517 |
| | TAEYFCAVSDLVRDDKIIFGKGTRLHILP | |
| | (X = any amino acid) | |
| α chain with | MLLLLVPAFQVIFTLGGTRAQSVTQLDSQVPVFEEAPVELRCNYSSSVSVYL | 1518 |
| WT signal | FWYVQYPNQGLQLLLKYLSGSTLVESINGFEAEFNKSQTSFHLRKPSVHISD | |
| peptide, Cα | TAEYFCAVSDLVRDDKIIFGKGTRLHILPNIQNPEPAVYQLKDPRSQDSTLC | |
| (substituted) | LFTDFDSQINVPKTMESGTFITDKCVLDMKAMDSKSNGAIAWSNQTSFTCQD | |
| | IFKETNATYPSSDVPCDATLTEKSFETDMNLNFQNLLVIVLRILLLKVAGEN | |
| | LLMTLRLWSS | |
| α chain with | MALLLVPAFQVIFTLGGTRAQSVTQLDSQVPVFEEAPVELRCNYSSSVSVYL | 1519 |
| alternative | FWYVQYPNQGLQLLLKYLSGSTLVESINGFEAEFNKSQTSFHLRKPSVHISD | |
| signal peptide, | TAEYFCAVSDLVRDDKIIFGKGTRLHILPNIQNPEPAVYQLKDPRSQDSTLC | |
| Cα | LFTDFDSQINVPKTMESGTFITDKCVLDMKAMDSKSNGAIAWSNQTSFTCQD | |
| (substituted) | IFKETNATYPSSDVPCDATLTEKSFETDMNLNFQNLLVIVLRILLLKVAGEN | |
| | LLMTLRLWSS | |
| α chain with | MHLLLVPAFQVIFTLGGTRAQSVTQLDSQVPVFEEAPVELRCNYSSSVSVYL | 1520 |
| alternative | FWYVQYPNQGLQLLLKYLSGSTLVESINGFEAEFNKSQTSFHLRKPSVHISD | |
| signal peptide, | TAEYFCAVSDLVRDDKIIFGKGTRLHILPNIQNPEPAVYQLKDPRSQDSTLC | |
| Cα | LFTDFDSQINVPKTMESGTFITDKCVLDMKAMDSKSNGAIAWSNQTSFTCQD | |
| (substituted) | IFKETNATYPSSDVPCDATLTEKSFETDMNLNFQNLLVIVLRILLLKVAGEN | |
| | LLMTLRLWSS | |
| CDR1β | MNHNS | 2511 |
| CDR2β | SASEGT | 2512 |
| CDR3β | ASIGGFEAF | 2513 |
| Vβ without | GVTQTPKFQVLKTGQSMTLQCAQDMNHNSMYWYRQDPGMGLRLIYYSASEGT | 2514 |
| signal peptide | TDKGEVPNGYNVSRLNKREFSLRLESAAPSQTSVYFCASIGGFEAFFGQGTR | |
| (SignalP) | LTVV | |
| Vβ without | NAGVTQTPKFQVLKTGQSMTLQCAQDMNHNSMYWYRQDPGMGLRLIYYSASE | 2515 |
| signal peptide | GTTDKGEVPNGYNVSRLNKREFSLRLESAAPSQTSVYFCASIGGFEAFFGQG | |
| (IMGT) | TRLTVV | |
| Vβ | MXIGLLCCVAFSLLWASPVNAGVTQTPKFQVLKTGQSMTLQCAQDMNHNSMY | 2516 |
| | WYRQDPGMGLRLIYYSASEGTTDKGEVPNGYNVSRLNKREFSLRLESAAPSQ | 2517 |
| | TSVYFCASIGGFEAFFGQGTRLTVV | |
| | (X = any amino acid) | |
| β chain with | MSIGLLCCVAFSLLWASPVNAGVTQTPKFQVLKTGQSMTLQCAQDMNHNSMY | 2518 |
| WT signal | WYRQDPGMGLRLIYYSASEGTTDKGEVPNGYNVSRLNKREFSLRLESAAPSQ | |
| peptide, Cβ | TSVYFCASIGGFEAFFGQGTRLTVVEDLRNVTPPKVSLFEPSKAEIANKQKA | |
| (substituted) | TLVCLARGFFPDHVELSWWVNGKEVHSGVCTDPQAYKESNYSYCLSSRLRVS | |
| | ATFWHNPRNHFRCQVQFHGLSEEDKWPEGSPKPVTQNISAEAWGRADCGITS | |
| | ASYQQGVLSATILYEILLGKATLYAVLVSTLVVMAMVKRKNS | |
| β chain with | MAIGLLCCVAFSLLWASPVNAGVTQTPKFQVLKTGQSMTLQCAQDMNHNSMY | 2519 |
| alternative | WYRQDPGMGLRLIYYSASEGTTDKGEVPNGYNVSRLNKREFSLRLESAAPSQ | |
| signal peptide, | TSVYFCASIGGFEAFFGQGTRLTVVEDLRNVTPPKVSLFEPSKAEIANKQKA | |
| Cβ | TLVCLARGFFPDHVELSWWVNGKEVHSGVCTDPQAYKESNYSYCLSSRLRVS | |
| (substituted) | ATFWHNPRNHFRCQVQFHGLSEEDKWPEGSPKPVTQNISAEAWGRADCGITS | |
| | ASYQQGVLSATILYEILLGKATLYAVLVSTLVVMAMVKRKNS | |
| β chain with | MHIGLLCCVAFSLLWASPVNAGVTQTPKFQVLKTGQSMTLQCAQDMNHNSMY | 2520 |
| alternative | WYRQDPGMGLRLIYYSASEGTTDKGEVPNGYNVSRLNKREFSLRLESAAPSQ | |
| signal peptide, | TSVYFCASIGGFEAFFGQGTRLTVVEDLRNVTPPKVSLFEPSKAEIANKQKA | |
| Cβ | TLVCLARGFFPDHVELSWWVNGKEVHSGVCTDPQAYKESNYSYCLSSRLRVS | |
| (substituted) | ATFWHNPRNHFRCQVQFHGLSEEDKWPEGSPKPVTQNISAEAWGRADCGITS | |
| | ASYQQGVLSATILYEILLGKATLYAVLVSTLVVMAMVKRKNS | |

[0216] In some embodiments, TCR052 interacts with and/or is specific for p53. In some embodiments, the peptide is from a neoantigen of p53. In some embodiments, the neoantigen has the amino acid change R248W relative to the wild type p53 sequence. In some embodiments, TCR052 interacts with the neoantigen in the context of HLA-A*68:01, as described in International Publication No. WO 2019/067243, incorporated herein by reference in its entirety.

TABLE 6BA
Amino acid sequences of TCR053.

| | | SEQ |
|---|---|---|
| | | ID |
| Description | Sequence | NO: |
| CDR1α | TSGFNG | 1521 |
| CDR2α | NVLDGL | 1522 |
| CDR3α | AVYPGGSQGNLI | 1523 |
| Vα without | QNIDQPTEMTATEGAIVQINCTYQTSGENGLFWYQQHAGEAPTFLSYNVLDG | 1524 |
| signal peptide | LEEKGRESSFLSRSKGYSYLLLKELQMKDSASYLCAVYPGGSQGNLIFGKGT | |
| (SignalP) | KLSVKP | |
| Vα without | GQNIDQPTEMTATEGAIVQINCTYQTSGENGLFWYQQHAGEAPTFLSYNVLD | 1525 |
| signal peptide | GLEEKGRFSSFLSRSKGYSYLLLKELQMKDSASYLCAVYPGGSQGNLIFGKG | |
| (IMGT) | TKLSVKP | |
| Vα | MXGVFLLYVSMKMGGTTGQNIDQPTEMTATEGAIVQINCTYQTSGENGLFWY | 1526 |
| | QQHAGEAPTFLSYNVLDGLEEKGRESSFLSRSKGYSYLLLKELQMKDSASYL | 1527 |
| | CAVYPGGSQGNLIFGKGTKLSVKP | |
| | (X = any amino acid) | |
| α chain with | MWGVFLLYVSMKMGGTTGQNIDQPTEMTATEGAIVQINCTYQTSGFNGLFWY | 1528 |
| WT signal | QQHAGEAPTFLSYNVLDGLEEKGRESSFLSRSKGYSYLLLKELQMKDSASYL | |
| peptide, Cα | CAVYPGGSQGNLIFGKGTKLSVKPNIQNPEPAVYQLKDPRSQDSTLCLFTDE | |
| (substituted) | DSQINVPKTMESGTFITDKCVLDMKAMDSKSNGAIAWSNQTSFTCQDIFKET | |
| | NATYPSSDVPCDATLTEKSFETDMNLNFQNLLVIVLRILLLKVAGENLLMTL | |
| | RLWSS | |
| α chain with | MAGVFLLYVSMKMGGTTGQNIDQPTEMTATEGAIVQINCTYQTSGENGLFWY | 1529 |
| alternative | QQHAGEAPTFLSYNVLDGLEEKGRFSSFLSRSKGYSYLLLKELQMKDSASYL | |
| signal peptide, | CAVYPGGSQGNLIFGKGTKLSVKPNIQNPEPAVYQLKDPRSQDSTLCLFTDE | |
| Cα | DSQINVPKTMESGTFITDKCVLDMKAMDSKSNGAIAWSNQTSFTCQDIFKET | |
| (substituted) | NATYPSSDVPCDATLTEKSFETDMNLNFQNLLVIVLRILLLKVAGENLLMTL | |
| | RLWSS | |
| α chain with | MHGVFLLYVSMKMGGTTGQNIDQPTEMTATEGAIVQINCTYQTSGENGLFWY | 1530 |
| alternative | QQHAGEAPTFLSYNVLDGLEEKGRESSFLSRSKGYSYLLLKELQMKDSASYL | |
| signal peptide, | CAVYPGGSQGNLIFGKGTKLSVKPNIQNPEPAVYQLKDPRSQDSTLCLFTDF | |
| Cα | DSQINVPKTMESGTFITDKCVLDMKAMDSKSNGAIAWSNQTSFTCQDIFKET | |
| (substituted) | NATYPSSDVPCDATLTEKSFETDMNLNFQNLLVIVLRILLLKVAGENLLMTL | |
| | RLWSS | |
| CDR1β | SGHAT | 2521 |
| CDR2β | FQNNGV | 2522 |
| CDR3β | ASSLGTGSTDTQY | 2523 |
| Vβ without | GVAQSPRYKIIEKRQSVAFWCNPISGHATLYWYQQILGQGPKLLIQFQNNGV | 2524 |
| signal peptide | VDDSQLPKDRFSAERLKGVDSTLKIQPAKLEDSAVYLCASSLGTGSTDTQYF | |
| (SignalP) | GPGTRLTVL | |
| Vβ without | EAGVAQSPRYKIIEKRQSVAFWCNPISGHATLYWYQQILGQGPKLLIQFQNN | 2525 |
| signal peptide | GVVDDSQLPKDRFSAERLKGVDSTLKIQPAKLEDSAVYLCASSLGTGSTDTQ | |
| (IMGT) | YFGPGTRLTVL | |
| Vβ | MXTRLLCWAALCLLGAELTEAGVAQSPRYKIIEKRQSVAFWCNPISGHATLY | 2526 |
| | WYQQILGQGPKLLIQFQNNGVVDDSQLPKDRFSAERLKGVDSTLKIQPAKLE | 2527 |
| | DSAVYLCASSLGTGSTDTQYFGPGTRLTVL | |
| | (X = any amino acid) | |
| β chain with | MGTRLLCWAALCLLGAELTEAGVAQSPRYKIIEKRQSVAFWCNPISGHATLY | 2528 |
| WT signal | WYQQILGQGPKLLIQFQNNGVVDDSQLPKDRFSAERLKGVDSTLKIQPAKLE | |
| peptide, Cβ | DSAVYLCASSLGTGSTDTQYFGPGTRLTVLEDLRNVTPPKVSLFEPSKAEIA | |
| (substituted) | NKQKATLVCLARGFFPDHVELSWWVNGKEVHSGVCTDPQAYKESNYSYCLSS | |
| | RLRVSATFWHNPRNHFRCQVQFHGLSEEDKWPEGSPKPVTQNISAEAWGRAD | |
| | CGITSASYQQGVLSATILYEILLGKATLYAVLVSTLVVMAMVKRKNS | |
| β chain with | MATRLLCWAALCLLGAELTEAGVAQSPRYKIIEKRQSVAFWCNPISGHATLY | 2529 |
| alternative | WYQQILGQGPKLLIQFQNNGVVDDSQLPKDRFSAERLKGVDSTLKIQPAKLE | |
| signal peptide, | DSAVYLCASSLGTGSTDTQYFGPGTRLTVLEDLRNVTPPKVSLFEPSKAEIA | |
| Cβ | NKQKATLVCLARGFFPDHVELSWWVNGKEVHSGVCTDPQAYKESNYSYCLSS | |
| (substituted) | RLRVSATFWHNPRNHFRCQVQFHGLSEEDKWPEGSPKPVTQNISAEAWGRAD | |
| | CGITSASYQQGVLSATILYEILLGKATLYAVLVSTLVVMAMVKRKNS | |
| β chain with | MHTRLLCWAALCLLGAELTEAGVAQSPRYKIIEKRQSVAFWCNPISGHATLY | 2530 |
| alternative | WYQQILGQGPKLLIQFQNNGVVDDSQLPKDRFSAERLKGVDSTLKIQPAKLE | |
| signal peptide, | DSAVYLCASSLGTGSTDTQYFGPGTRLTVLEDLRNVTPPKVSLFEPSKAEIA | |
| Cβ | NKQKATLVCLARGFFPDHVELSWWVNGKEVHSGVCTDPQAYKESNYSYCLSS | |
| (substituted) | RLRVSATFWHNPRNHFRCQVQFHGLSEEDKWPEGSPKPVTQNISAEAWGRAD | |
| | CGITSASYQQGVLSATILYEILLGKATLYAVLVSTLVVMAMVKRKNS | |

[0217] In some embodiments, TCR053 interacts with and/or is specific for p53. In some embodiments, the peptide is from a neoantigen of p53. In some embodiments, the neoantigen has the amino acid change R248W relative to the wild type p53 sequence. In some embodiments, TCR053 interacts with the neoantigen in the context of HLA-A*68:01, as described in International Publication No. WO 2019/067243, incorporated herein by reference in its entirety.

TABLE 6BB
Amino acid sequences of TCR054.

| | | SEQ |
|---|---|---|
| | | ID |
| Description | Sequence | NO: |
| CDR1α | DRGSQS | 1531 |
| CDR2α | IYSNGD | 1532 |
| CDR3α | AVTLSGGYNKLI | 1533 |
| Vα w/o signal | QQKEVEQNSGPLSVPEGAIASLNCTYSDRGSQSFFWYRQYSGKSPELIMFIY | 1534 |
| peptide | SNGDKEDGRFTAQLNKASQYVSLLIRDSQPSDSATYLCAVTLSGGYNKLIFG | |
| (SignalP) | AGTRLAVHP | |
| Vα w/o signal | QKEVEQNSGPLSVPEGAIASLNCTYSDRGSQSFFWYRQYSGKSPELIMFIYS | 1535 |
| peptide | NGDKEDGRFTAQLNKASQYVSLLIRDSQPSDSATYLCAVTLSGGYNKLIFGA | |
| (IMGT) | GTRLAVHP | |
| Vα | MXSLRVLLVILWLQLSWVWSQQKEVEQNSGPLSVPEGAIASLNCTYSDRGSQ | 1536 |
| | SFFWYRQYSGKSPELIMFIYSNGDKEDGRFTAQLNKASQYVSLLIRDSQPSD | 1537 |
| | SATYLCAVTLSGGYNKLIFGAGTRLAVHP | |
| | (X = any amino acid) | |
| α chain w/WT | MKSLRVLLVILWLQLSWVWSQQKEVEQNSGPLSVPEGAIASLNCTYSDRGSQ | 1538 |
| signal peptide, | SFFWYRQYSGKSPELIMFIYSNGDKEDGRFTAQLNKASQYVSLLIRDSQPSD | |
| Cα | SATYLCAVTLSGGYNKLIFGAGTRLAVHPNIQNPEPAVYQLKDPRSQDSTLC | |
| (substituted) | LFTDFDSQINVPKTMESGTFITDKCVLDMKAMDSKSNGAIAWSNQTSFTCQD | |
| | IFKETNATYPSSDVPCDATLTEKSFETDMNLNFQNLLVIVLRILLLKVAGEN | |
| | LLMTLRLWSS | |
| α chain w/ | MASLRVLLVILWLQLSWVWSQQKEVEQNSGPLSVPEGAIASLNCTYSDRGSQ | 1539 |
| alternative | SFFWYRQYSGKSPELIMFIYSNGDKEDGRFTAQLNKASQYVSLLIRDSQPSD | |
| signal peptide, | SATYLCAVTLSGGYNKLIFGAGTRLAVHPNIQNPEPAVYQLKDPRSQDSTLC | |
| Cα | LFTDFDSQINVPKTMESGTFITDKCVLDMKAMDSKSNGAIAWSNQTSFTCQD | |
| (substituted) | IFKETNATYPSSDVPCDATLTEKSFETDMNLNFQNLLVIVLRILLLKVAGEN | |
| | LLMTLRLWSS | |
| α chain w/ | MHSLRVLLVILWLQLSWVWSQQKEVEQNSGPLSVPEGAIASLNCTYSDRGSQ | 1540 |
| alternative | SFFWYRQYSGKSPELIMFIYSNGDKEDGRFTAQLNKASQYVSLLIRDSQPSD | |
| signal peptide, | SATYLCAVTLSGGYNKLIFGAGTRLAVHPNIQNPEPAVYQLKDPRSQDSTLC | |
| Cα | LFTDFDSQINVPKTMESGTFITDKCVLDMKAMDSKSNGAIAWSNQTSFTCQD | |
| (substituted) | IFKETNATYPSSDVPCDATLTEKSFETDMNLNFQNLLVIVLRILLLKVAGEN | |
| | LLMTLRLWSS | |
| CDR1β | LNHDA | 2531 |
| CDR2β | SQIVND | 2532 |
| CDR3β | ASSSRDYEQY | 2533 |
| Vβ w/o signal | GITQSPKYLFRKEGQNVTLSCEQNLNHDAMYWYRQDPGQGLRLIYYSQIVND | 2534 |
| peptide | FQKGDIVEGYSVSREKKESFPLTVTSAQKNPTAFYLCASSSRDYEQYFGPGT | |
| (SignalP) | RLTVT | |
| Vβ w/o signal | DGGITQSPKYLFRKEGQNVTLSCEQNLNHDAMYWYRQDPGQGLRLIYYSQIV | 2535 |
| peptide | NDFQKGDIVEGYSVSREKKESFPLTVTSAQKNPTAFYLCASSSRDYEQYFGP | |
| (IMGT) | GTRLTVT | |
| Vβ | MXNQVLCCVVLCFLGANTVDGGITQSPKYLFRKEGQNVTLSCEQNLNHDAMY | 2536 |
| | WYRQDPGQGLRLIYYSQIVNDFQKGDIVEGYSVSREKKESFPLTVTSAQKNP | 2537 |
| | TAFYLCASSSRDYEQYFGPGTRLTVT | |
| | (X = any amino acid) | |
| β chain w/WT | MSNQVLCCVVLCFLGANTVDGGITQSPKYLFRKEGQNVTLSCEQNLNHDAMY | 2538 |
| signal peptide, | WYRQDPGQGLRLIYYSQIVNDFQKGDIVEGYSVSREKKESFPLTVTSAQKNP | |
| Cβ | TAFYLCASSSRDYEQYFGPGTRLTVTEDLRNVTPPKVSLFEPSKAEIANKQK | |
| (substituted) | ATLVCLARGFFPDHVELSWWVNGKEVHSGVCTDPQAYKESNYSYCLSSRLRV | |
| | SATFWHNPRNHFRCQVQFHGLSEEDKWPEGSPKPVTQNISAEAWGRADCGIT | |
| | SASYQQGVLSATILYEILLGKATLYAVLVSTLVVMAMVKRKNS | |
| β chain w/ | MANQVLCCVVLCFLGANTVDGGITQSPKYLFRKEGQNVTLSCEQNINHDAMY | 2539 |
| alternative | WYRQDPGQGLRLIYYSQIVNDFQKGDIVEGYSVSREKKESFPLTVTSAQKNP | |
| signal peptide, | TAFYLCASSSRDYEQYFGPGTRLTVTEDLRNVTPPKVSLFEPSKAEIANKQK | |
| Cβ | ATLVCLARGFFPDHVELSWWVNGKEVHSGVCTDPQAYKESNYSYCLSSRLRV | |
| (substituted) | SATFWHNPRNHFRCQVQFHGLSEEDKWPEGSPKPVTQNISAEAWGRADCGIT | |
| | SASYQQGVLSATILYEILLGKATLYAVLVSTLVVMAMVKRKNS | |
| β chain w/ | MHNQVLCCVVLCFLGANTVDGGITQSPKYLFRKEGQNVTLSCEQNLNHDAMY | 2540 |
| alternative | WYRQDPGQGLRLIYYSQIVNDFQKGDIVEGYSVSREKKESFPLTVTSAQKNP | |
| signal peptide, | TAFYLCASSSRDYEQYFGPGTRLTVTEDLRNVTPPKVSLFEPSKAEIANKQK | |
| Cβ | ATLVCLARGFFPDHVELSWWVNGKEVHSGVCTDPQAYKESNYSYCLSSRLRV | |
| (substituted) | SATFWHNPRNHFRCQVQFHGLSEEDKWPEGSPKPVTQNISAEAWGRADCGIT | |
| | SASYQQGVLSATILYEILLGKATLYAVLVSTLVVMAMVKRKNS | |

[0218] In some embodiments, TCR054 interacts with and/or is specific for p53. In some embodiments, the peptide is from a neoantigen of p53. In some embodiments, the neoantigen has the amino acid change R248W relative to the wild type p53 sequence. In some embodiments, TCR054 interacts with the neoantigen in the context of DPA1*01:03/DBP1*02:01 as described in International Publication No. WO 2019/067243, incorporated herein by reference in its entirety.

TABLE 6BC
Amino acid sequences of TCR055.

| | | SEQ |
|---|---|---|
| | | ID |
| Description | Sequence | NO: |
| CDR1α | NSASDY | 1541 |
| CDR2α | IRSNMDK | 1542 |
| CDR3α | AEYIQGAQKLV | 1543 |
| Vα without | ESVGLHLPTLSVQEGDNSIINCAYSNSASDYFIWYKQESGKGPQFIIDIRSN | 1544 |
| signal peptide | MDKRQGQRVTVLLNKTVKHLSLQIAATQPGDSAVYFCAEYIQGAQKLVFGQG | |
| (SignalP) | TRLTINP | |
| Vα without | GESVGLHLPTLSVQEGDNSIINCAYSNSASDYFIWYKQESGKGPQFIIDIRS | 1545 |
| signal peptide | NMDKRQGQRVTVLLNKTVKHLSLQIAATQPGDSAVYFCAEYIQGAQKLVFGQ | |
| (IMGT) | GTRLTINP | |
| Vα | MXGIRALFMYLWLQLDWVSRGESVGLHLPTLSVQEGDNSIINCAYSNSASDY | 1546 |
| | FIWYKQESGKGPQFIIDIRSNMDKRQGQRVTVLLNKTVKHLSLQIAATQPGD | 1547 |
| | SAVYFCAEYIQGAQKLVFGQGTRLTINP | |
| | (X = any amino acid) | |
| α chain with | MAGIRALFMYLWLQLDWVSRGESVGLHLPTLSVQEGDNSIINCAYSNSASDY | 1548 |
| WT signal | FIWYKQESGKGPQFIIDIRSNMDKRQGQRVTVLLNKTVKHLSLQIAATQPGD | |
| peptide, Cα | SAVYFCAEYIQGAQKLVFGQGTRLTINPNIQNPEPAVYQLKDPRSQDSTLCL | |
| (substituted) | FTDFDSQINVPKTMESGTFITDKCVLDMKAMDSKSNGAIAWSNQTSFTCQDI | |
| | FKETNATYPSSDVPCDATLTEKSFETDMNLNFQNLLVIVLRILLLKVAGENL | |
| | LMTLRLWSS | |
| α chain with | MAGIRALFMYLWLQLDWVSRGESVGLHLPTLSVQEGDNSIINCAYSNSASDY | 1549 |
| alternative | FIWYKQESGKGPQFIIDIRSNMDKRQGQRVTVLLNKTVKHLSLQIAATQPGD | |
| signal peptide, | SAVYFCAEYIQGAQKLVFGQGTRLTINPNIQNPEPAVYQLKDPRSQDSTLCL | |
| Cα | FTDFDSQINVPKTMESGTFITDKCVLDMKAMDSKSNGAIAWSNQTSFTCQDI | |
| (substituted) | FKETNATYPSSDVPCDATLTEKSFETDMNLNFQNLLVIVLRILLLKVAGENL | |
| | LMTLRLWSS | |
| α chain with | MHGIRALFMYLWLQLDWVSRGESVGLHLPTLSVQEGDNSIINCAYSNSASDY | 1550 |
| alternative | FIWYKQESGKGPQFIIDIRSNMDKRQGQRVTVLLNKTVKHLSLQIAATQPGD | |
| signal peptide, | SAVYFCAEYIQGAQKLVFGQGTRLTINPNIQNPEPAVYQLKDPRSQDSTLCL | |
| Cα | FTDFDSQINVPKTMESGTFITDKCVLDMKAMDSKSNGAIAWSNQTSFTCQDI | |
| (substituted) | FKETNATYPSSDVPCDATLTEKSFETDMNLNFQNLLVIVLRILLLKVAGENL | |
| | LMTLRLWSS | |
| CDR1β | LGHNA | 2541 |
| CDR2β | YSLEER | 2542 |
| CDR3β | ASSQEDNEQF | 2543 |
| Vβ without | ELVPMETGVTQTPRHLVMGMTNKKSLKCEQHLGHNAMYWYKQSAKKPLELMF | 2544 |
| signal peptide | VYSLEERVENNSVPSRFSPECPNSSHLFLHLHTLQPEDSALYLCASSQEDNE | |
| (SignalP) | QFFGPGTRLTVL | |
| Vβ without | ETGVTQTPRHLVMGMTNKKSLKCEQHLGHNAMYWYKQSAKKPLELMFVYSLE | 2545 |
| signal peptide | ERVENNSVPSRESPECPNSSHLFLHLHTLQPEDSALYLCASSQEDNEQFFGP | |
| (IMGT) | GTRLTVL | |
| Vβ | MXCRLLCCAVLCLLGAGELVPMETGVTQTPRHLVMGMTNKKSLKCEQHLGHN | 2546 |
| | AMYWYKQSAKKPLELMFVYSLEERVENNSVPSRFSPECPNSSHLFLHLHTLQ | |
| | PEDSALYLCASSQEDNEQFFGPGTRLTVL | 2547 |
| | (X = any amino acid) | |
| β chain with | MGCRLLCCAVLCLLGAGELVPMETGVTQTPRHLVMGMTNKKSLKCEQHLGHN | 2548 |
| WT signal | AMYWYKQSAKKPLELMFVYSLEERVENNSVPSRESPECPNSSHLFLHLHTLQ | |
| peptide, Cβ | PEDSALYLCASSQEDNEQFFGPGTRLTVLEDLRNVTPPKVSLFEPSKAEIAN | |
| (substituted) | KQKATLVCLARGFFPDHVELSWWVNGKEVHSGVCTDPQAYKESNYSYCLSSR | |
| | LRVSATFWHNPRNHFRCQVQFHGLSEEDKWPEGSPKPVTQNISAEAWGRADC | |
| | GITSASYQQGVLSATILYEILLGKATLYAVLVSTLVVMAMVKRKNS | |
| chain with | MACRLLCCAVLCLLGAGELVPMETGVTQTPRHLVMGMTNKKSLKCEQHLGHN | 2549 |
| alternative | AMYWYKQSAKKPLELMFVYSLEERVENNSVPSRESPECPNSSHLFLHLHTLQ | |
| signal peptide, | PEDSALYLCASSQEDNEQFFGPGTRLTVLEDLRNVTPPKVSLFEPSKAEIAN | |
| Cβ | KQKATLVCLARGFFPDHVELSWWVNGKEVHSGVCTDPQAYKESNYSYCLSSR | |
| (substituted) | LRVSATFWHNPRNHFRCQVQFHGLSEEDKWPEGSPKPVTQNISAEAWGRADC | |
| | GITSASYQQGVLSATILYEILLGKATLYAVLVSTLVVMAMVKRKNS | |
| β chain with | MHCRLLCCAVLCLLGAGELVPMETGVTQTPRHLVMGMTNKKSLKCEQHLGHN | 2550 |
| alternative | AMYWYKQSAKKPLELMFVYSLEERVENNSVPSRFSPECPNSSHLFLHLHTLQ | |
| signal peptide, | PEDSALYLCASSQEDNEQFFGPGTRLTVLEDLRNVTPPKVSLFEPSKAEIAN | |
| Cβ | KQKATLVCLARGFFPDHVELSWWVNGKEVHSGVCTDPQAYKESNYSYCLSSR | |
| (substituted) | LRVSATFWHNPRNHFRCQVQFHGLSEEDKWPEGSPKPVTQNISAEAWGRADC | |
| | GITSASYQQGVLSATILYEILLGKATLYAVLVSTLVVMAMVKRKNS | |

[0219] In some embodiments, TCR055 interacts with and/or is specific for KRAS. In some embodiments, the peptide is from a neoantigen of KRAS. In some embodiments, the neoantigen has the amino acid change G12V relative to the wild type KRAS sequence. In some embodiments, TCR055 interacts with the neoantigen in the context of HLA-C*01:02, as described in International Publication No. WO 2021/163477, incorporated herein by reference in its entirety.

TABLE 6BD
Amino acid sequences of TCR056.

| | | SEQ |
|---|---|---|
| | | ID |
| Description | Sequence | NO: |
| CDR1α | DRGSQS | 1551 |
| CDR2α | IYSNGD | 1552 |
| CDR3α | AVNPPVKTSYDKVI | 1553 |
| Vα without | QQKEVEQNSGPLSVPEGAIASLNCTYSDRGSQSFFWYRQYSGKSPELIMFIY | 1554 |
| signal peptide | SNGDKEDGRFTAQLNKASQYVSLLIRDSQPSDSATYLCAVNPPVKTSYDKVI | |
| (SignalP) | FGPGTSLSVIP | |
| Vα without | QKEVEQNSGPLSVPEGAIASLNCTYSDRGSQSFFWYRQYSGKSPELIMFIYS | 1555 |
| signal peptide | NGDKEDGRFTAQLNKASQYVSLLIRDSQPSDSATYLCAVNPPVKTSYDKVIF | |
| (IMGT) | GPGTSLSVIP | |
| Vα | MXSLRVLLVILWLQLSWVWSQQKEVEQNSGPLSVPEGAIASLNCTYSDRGSQ | 1556 |
| | SFFWYRQYSGKSPELIMFIYSNGDKEDGRFTAQLNKASQYVSLLIRDSQPSD | 1557 |
| | SATYLCAVNPPVKTSYDKVIFGPGTSLSVIP | |
| | (X = any amino acid) | |
| α chain with | MKSLRVLLVILWLQLSWVWSQQKEVEQNSGPLSVPEGAIASLNCTYSDRGSQ | 1558 |
| WT signal | SFFWYRQYSGKSPELIMFIYSNGDKEDGRFTAQLNKASQYVSLLIRDSQPSD | |
| peptide, Cα | SATYLCAVNPPVKTSYDKVIFGPGTSLSVIPNIQNPEPAVYQLKDPRSQDST | |
| (substituted) | LCLFTDFDSQINVPKTMESGTFITDKCVLDMKAMDSKSNGAIAWSNQTSFTC | |
| | QDIFKETNATYPSSDVPCDATLTEKSFETDMNLNFQNLLVIVLRILLLKVAG | |
| | FNLLMTLRLWSS | |
| α chain with | MASLRVLLVILWLQLSWVWSQQKEVEQNSGPLSVPEGAIASLNCTYSDRGSQ | 1559 |
| alternative | SFFWYRQYSGKSPELIMFIYSNGDKEDGRFTAQLNKASQYVSLLIRDSQPSD | |
| signal peptide, | SATYLCAVNPPVKTSYDKVIFGPGTSLSVIPNIQNPEPAVYQLKDPRSQDST | |
| Cα | LCLFTDFDSQINVPKTMESGTFITDKCVLDMKAMDSKSNGAIAWSNQTSFTC | |
| (substituted) | QDIFKETNATYPSSDVPCDATLTEKSFETDMNLNFQNLLVIVLRILLLKVAG | |
| | FNLLMTLRLWSS | |
| α chain with | MHSLRVLLVILWLQLSWVWSQQKEVEQNSGPLSVPEGAIASLNCTYSDRGSQ | 1560 |
| alternative | SFFWYRQYSGKSPELIMFIYSNGDKEDGRFTAQLNKASQYVSLLIRDSQPSD | |
| signal peptide, | SATYLCAVNPPVKTSYDKVIFGPGTSLSVIPNIQNPEPAVYQLKDPRSQDST | |
| Cα | LCLFTDFDSQINVPKTMESGTFITDKCVLDMKAMDSKSNGAIAWSNQTSFTC | |
| (substituted) | QDIFKETNATYPSSDVPCDATLTEKSFETDMNLNFQNLLVIVLRILLLKVAG | |
| | FNLLMTLRLWSS | |
| CDR1β | SGHVS | 2551 |
| CDR2β | FNYEA | 2552 |
| CDR3β | ASSHREPHTGELF | 2553 |
| Vβ without | GVSQSPRYKVTKRGQDVALRCDPISGHVSLYWYRQALGQGPEFLTYFNYEAQ | 2554 |
| signal peptide | QDKSGLPNDRFSAERPEGSISTLTIQRTEQRDSAMYRCASSHREPHTGELFF | |
| (SignalP) | GEGSRLTVL | |
| Vβ without | GAGVSQSPRYKVTKRGQDVALRCDPISGHVSLYWYRQALGQGPEFLTYFNYE | 2555 |
| signal peptide | AQQDKSGLPNDRESAERPEGSISTLTIQRTEQRDSAMYRCASSHREPHTGEL | |
| (IMGT) | FFGEGSRLTVL | |
| Vβ | MXTSLLCWVVLGFLGTDHTGAGVSQSPRYKVTKRGQDVALRCDPISGHVSLY | 2556 |
| | WYRQALGQGPEFLTYFNYEAQQDKSGLPNDRFSAERPEGSISTLTIQRTEQR | 2557 |
| | DSAMYRCASSHREPHTGELFFGEGSRLTVL | |
| | (X = any amino acid) | |
| β chain with | MGTSLLCWVVLGFLGTDHTGAGVSQSPRYKVTKRGQDVALRCDPISGHVSLY | 2558 |
| WT signal | WYRQALGQGPEFLTYFNYEAQQDKSGLPNDRFSAERPEGSISTLTIQRTEQR | |
| peptide, Cβ | DSAMYRCASSHREPHTGELFFGEGSRLTVLEDLRNVTPPKVSLFEPSKAEIA | |
| (substituted) | NKQKATLVCLARGFFPDHVELSWWVNGKEVHSGVCTDPQAYKESNYSYCLSS | |
| | RLRVSATFWHNPRNHFRCQVQFHGLSEEDKWPEGSPKPVTQNISAEAWGRAD | |
| | CGITSASYQQGVLSATILYEILLGKATLYAVLVSTLVVMAMVKRKNS | |
| β chain with | MATSLLCWVVLGFLGTDHTGAGVSQSPRYKVTKRGQDVALRCDPISGHVSLY | 2559 |
| alternative | WYRQALGQGPEFLTYFNYEAQQDKSGLPNDRFSAERPEGSISTLTIQRTEQR | |
| signal peptide, | DSAMYRCASSHREPHTGELFFGEGSRLTVLEDLRNVTPPKVSLFEPSKAEIA | |
| Cβ | NKQKATLVCLARGFFPDHVELSWWVNGKEVHSGVCTDPQAYKESNYSYCLSS | |
| (substituted) | RLRVSATFWHNPRNHFRCQVQFHGLSEEDKWPEGSPKPVTQNISAEAWGRAD | |
| | CGITSASYQQGVLSATILYEILLGKATLYAVLVSTLVVMAMVKRKNS | |
| β chain with | MHTSLLCWVVLGFLGTDHTGAGVSQSPRYKVTKRGQDVALRCDPISGHVSLY | 2560 |
| alternative | WYRQALGQGPEFLTYFNYEAQQDKSGLPNDRFSAERPEGSISTLTIQRTEQR | |
| signal peptide, | DSAMYRCASSHREPHTGELFFGEGSRLTVLEDLRNVTPPKVSLFEPSKAEIA | |
| Cβ | NKQKATLVCLARGFFPDHVELSWWVNGKEVHSGVCTDPQAYKESNYSYCLSS | |
| (substituted) | RLRVSATFWHNPRNHFRCQVQFHGLSEEDKWPEGSPKPVTQNISAEAWGRAD | |
| | CGITSASYQQGVLSATILYEILLGKATLYAVLVSTLVVMAMVKRKNS | |

[0220] In some embodiments, TCR056 interacts with and/or is specific for p53. In some embodiments, the peptide is from a neoantigen of p53. In some embodiments, the neoantigen has the amino acid change R248W relative to the wild type p53 sequence. In some embodiments, TCR056 interacts with the neoantigen in the context of HLA-A*02:01, as described in International Publication No. WO 2019/067243, incorporated herein by reference in its entirety.

TABLE 6BE
Amino acid sequences of TCR057.

| | | SEQ |
|---|---|---|
| | | ID |
| Description | Sequence | NO: |
| CDR1α | TSGENG | 1561 |
| CDR2α | NVLDGL | 1562 |
| CDR3α | AVYTGGFKTI | 1563 |
| Vα without | QNIDQPTEMTATEGAIVQINCTYQTSGENGLFWYQQHAGEAPTFLSYNVLDG | 1564 |
| signal peptide | LEEKGRESSFLSRSKGYSYLLLKELQMKDSASYLCAVYTGGFKTIFGAGTRL | |
| (SignalP) | FVKA | |
| Vα without | GQNIDQPTEMTATEGAIVQINCTYQTSGENGLFWYQQHAGEAPTFLSYNVLD | 1565 |
| signal peptide | GLEEKGRFSSFLSRSKGYSYLLLKELQMKDSASYLCAVYTGGFKTIFGAGTR | |
| (IMGT) | LFVKA | |
| Vα | MXGVFLLYVSMKMGGTTGQNIDQPTEMTATEGAIVQINCTYQTSGENGLFWY | 1566 |
| | QQHAGEAPTFLSYNVLDGLEEKGRESSFLSRSKGYSYLLLKELQMKDSASYL | 1567 |
| | CAVYTGGFKTIFGAGTRLFVKA | |
| | (X = any amino acid) | |
| α chain with | MWGVFLLYVSMKMGGTTGQNIDQPTEMTATEGAIVQINCTYQTSGENGLFWY | 1568 |
| WT signal | QQHAGEAPTFLSYNVLDGLEEKGRESSFLSRSKGYSYLLLKELQMKDSASYL | |
| peptide, Cα | CAVYTGGFKTIFGAGTRLFVKANIQNPEPAVYQLKDPRSQDSTLCLFTDEDS | |
| (substituted) | QINVPKTMESGTFITDKCVLDMKAMDSKSNGAIAWSNQTSFTCQDIFKETNA | |
| | TYPSSDVPCDATLTEKSFETDMNLNFQNLLVIVLRILLLKVAGENLLMTLRL | |
| | WSS | |
| α chain with | MAGVFLLYVSMKMGGTTGQNIDQPTEMTATEGAIVQINCTYQTSGFNGLFWY | 1569 |
| alternative | QQHAGEAPTFLSYNVLDGLEEKGRFSSFLSRSKGYSYLLLKELQMKDSASYL | |
| signal peptide, | CAVYTGGFKTIFGAGTRLFVKANIQNPEPAVYQLKDPRSQDSTLCLFTDFDS | |
| Cα | QINVPKTMESGTFITDKCVLDMKAMDSKSNGAIAWSNQTSFTCQDIFKETNA | |
| (substituted) | TYPSSDVPCDATLTEKSFETDMNLNFQNLLVIVLRILLLKVAGENLLMTLRL | |
| | WSS | |
| α chain with | MHGVFLLYVSMKMGGTTGQNIDQPTEMTATEGAIVQINCTYQTSGENGLFWY | 1570 |
| alternative | QQHAGEAPTFLSYNVLDGLEEKGRESSFLSRSKGYSYLLLKELQMKDSASYL | |
| signal peptide, | CAVYTGGFKTIFGAGTRLFVKANIQNPEPAVYQLKDPRSQDSTLCLFTDEDS | |
| Cα | QINVPKTMESGTFITDKCVLDMKAMDSKSNGAIAWSNQTSFTCQDIFKETNA | |
| (substituted) | TYPSSDVPCDATLTEKSFETDMNLNFQNLLVIVLRILLLKVAGENLLMTLRL | |
| | WSS | |
| CDR1β | SGHAT | 2561 |
| CDR2β | FQNNGV | 2562 |
| CDR3β | ASNLGGGSTDTQY | 2563 |
| Vβ without | GVAQSPRYKIIEKRQSVAFWCNPISGHATLYWYQQILGQGPKLLIQFQNNGV | 2564 |
| signal peptide | VDDSQLPKDRFSAERLKGVDSTLKIQPAKLEDSAVYLCASNLGGGSTDTQYF | |
| (SignalP) | GPGTRLTVL | |
| Vβ without | EAGVAQSPRYKIIEKRQSVAFWCNPISGHATLYWYQQILGQGPKLLIQFQNN | 2565 |
| signal peptide | GVVDDSQLPKDRFSAERLKGVDSTLKIQPAKLEDSAVYLCASNLGGGSTDTQ | |
| (IMGT) | YFGPGTRLTVL | |
| Vβ | MXTRLLCWAALCLLGAELTEAGVAQSPRYKIIEKRQSVAFWCNPISGHATLY | 2566 |
| | WYQQILGQGPKLLIQFQNNGVVDDSQLPKDRFSAERLKGVDSTLKIQPAKLE | 2567 |
| | DSAVYLCASNLGGGSTDTQYFGPGTRLTVL | |
| | (X = any amino acid) | |
| β chain with | MGTRLLCWAALCLLGAELTEAGVAQSPRYKIIEKRQSVAFWCNPISGHATLY | 2568 |
| WT signal | WYQQILGQGPKLLIQFQNNGVVDDSQLPKDRFSAERLKGVDSTLKIQPAKLE | |
| peptide, Cβ | DSAVYLCASNLGGGSTDTQYFGPGTRLTVLEDLRNVTPPKVSLFEPSKAEIA | |
| (substituted) | NKQKATLVCLARGFFPDHVELSWWVNGKEVHSGVCTDPQAYKESNYSYCLSS | |
| | RLRVSATFWHNPRNHFRCQVQFHGLSEEDKWPEGSPKPVTQNISAEAWGRAD | |
| | CGITSASYQQGVLSATILYEILLGKATLYAVLVSTLVVMAMVKRKNS | |
| β chain with | MATRLLCWAALCLLGAELTEAGVAQSPRYKIIEKRQSVAFWCNPISGHATLY | 2569 |
| alternative | WYQQILGQGPKLLIQFQNNGVVDDSQLPKDRFSAERLKGVDSTLKIQPAKLE | |
| signal peptide, | DSAVYLCASNLGGGSTDTQYFGPGTRLTVLEDLRNVTPPKVSLFEPSKAEIA | |
| Cβ | NKQKATLVCLARGFFPDHVELSWWVNGKEVHSGVCTDPQAYKESNYSYCLSS | |
| (substituted) | RLRVSATFWHNPRNHFRCQVQFHGLSEEDKWPEGSPKPVTQNISAEAWGRAD | |
| | CGITSASYQQGVLSATILYEILLGKATLYAVLVSTLVVMAMVKRKNS | |
| β chain with | MHTRLLCWAALCLLGAELTEAGVAQSPRYKIIEKRQSVAFWCNPISGHATLY | 2570 |
| alternative | WYQQILGQGPKLLIQFQNNGVVDDSQLPKDRFSAERLKGVDSTLKIQPAKLE | |
| signal peptide, | DSAVYLCASNLGGGSTDTQYFGPGTRLTVLEDLRNVTPPKVSLFEPSKAEIA | |
| Cβ | NKQKATLVCLARGFFPDHVELSWWVNGKEVHSGVCTDPQAYKESNYSYCLSS | |
| (substituted) | RLRVSATFWHNPRNHFRCQVQFHGLSEEDKWPEGSPKPVTQNISAEAWGRAD | |
| | CGITSASYQQGVLSATILYEILLGKATLYAVLVSTLVVMAMVKRKNS | |

[0221] In some embodiments, TCR057 interacts with and/or is specific for p53. In some embodiments, the peptide is from a neoantigen of p53. In some embodiments, the neoantigen has the amino acid change R248W relative to the wild type p53 sequence. In some embodiments, TCR057 interacts with the neoantigen in the context of HLA-A*68:01, as described in International Publication No. WO 2019/067243, incorporated herein by reference in its entirety.

TABLE 6BF
Amino acid sequences of TCR058.

| | | SEQ |
|---|---|---|
| | | ID |
| Description | Sequence | NO: |
| CDR1α | NSASQS | 1571 |
| CDR2α | VYSSGN | 1572 |
| CDR3α | AVNPKYTGGFKTI | 1573 |
| Vα without | QRKEVEQDPGPFNVPEGATVAFNCTYSNSASQSFFWYRQDCRKEPKLLMSVY | 1574 |
| signal peptide | SSGNEDGRFTAHLNRASQYISLLIRDSKLSDSATYLCAVNPKYTGGFKTIFG | |
| (SignalP) | AGTRLFVKA | |
| Vα without | RKEVEQDPGPFNVPEGATVAFNCTYSNSASQSFFWYRQDCRKEPKLLMSVYS | 1575 |
| signal peptide | SGNEDGRFTAHLNRASQYISLLIRDSKLSDSATYLCAVNPKYTGGFKTIFGA | |
| (IMGT) | GTRLFVKA | |
| Vα | MXSLRVLLVILWLQLSWVWSQRKEVEQDPGPFNVPEGATVAFNCTYSNSASQ | 1576 |
| | SFFWYRQDCRKEPKLLMSVYSSGNEDGRFTAHLNRASQYISLLIRDSKLSDS | 1577 |
| | ATYLCAVNPKYTGGFKTIFGAGTRLFVKA | |
| | (X = any amino acid) | |
| α chain with | MISLRVLLVILWLQLSWVWSQRKEVEQDPGPFNVPEGATVAFNCTYSNSASQ | 1578 |
| WT signal | SFFWYRQDCRKEPKLLMSVYSSGNEDGRFTAHLNRASQYISLLIRDSKLSDS | |
| peptide, Cα | ATYLCAVNPKYTGGFKTIFGAGTRLFVKANIQNPEPAVYQLKDPRSQDSTLC | |
| (substituted) | LFTDFDSQINVPKTMESGTFITDKCVLDMKAMDSKSNGAIAWSNQTSFTCQD | |
| | IFKETNATYPSSDVPCDATLTEKSFETDMNLNFQNLLVIVLRILLLKVAGEN | |
| | LLMTLRLWSS | |
| α chain with | MASLRVLLVILWLQLSWVWSQRKEVEQDPGPFNVPEGATVAFNCTYSNSASQ | 1579 |
| alternative | SFFWYRQDCRKEPKLLMSVYSSGNEDGRFTAHLNRASQYISLLIRDSKLSDS | |
| signal peptide, | ATYLCAVNPKYTGGFKTIFGAGTRLFVKANIQNPEPAVYQLKDPRSQDSTLC | |
| Cα | LFTDFDSQINVPKTMESGTFITDKCVLDMKAMDSKSNGAIAWSNQTSFTCQD | |
| (substituted) | IFKETNATYPSSDVPCDATLTEKSFETDMNLNFQNLLVIVLRILLLKVAGEN | |
| | LLMTLRLWSS | |
| α chain with | MHSLRVLLVILWLQLSWVWSQRKEVEQDPGPFNVPEGATVAFNCTYSNSASQ | 1580 |
| alternative | SFFWYRQDCRKEPKLLMSVYSSGNEDGRFTAHLNRASQYISLLIRDSKLSDS | |
| signal peptide, | ATYLCAVNPKYTGGFKTIFGAGTRLFVKANIQNPEPAVYQLKDPRSQDSTLC | |
| Cα | LFTDFDSQINVPKTMESGTFITDKCVLDMKAMDSKSNGAIAWSNQTSFTCQD | |
| (substituted) | IFKETNATYPSSDVPCDATLTEKSFETDMNLNFQNLLVIVLRILLLKVAGEN | |
| | LLMTLRLWSS | |
| CDR1β | LGHNA | 2571 |
| CDR2β | YSLEER | 2572 |
| CDR3β | ASSQDVTSEWVDTIY | 2573 |
| Vβ without | ELVPMETGVTQTPRHLVMGMTNKKSLKCEQHLGHNAMYWYKQSAKKPLELMF | 2574 |
| signal peptide | VYSLEERVENNSVPSRFSPECPNSSHLFLHLHTLQPEDSALYLCASSQDVTS | |
| (SignalP) | EWVDTIYFGEGSWLTVV | |
| Vβ without | ETGVTQTPRHLVMGMTNKKSLKCEQHLGHNAMYWYKQSAKKPLELMFVYSLE | 2575 |
| signal peptide | ERVENNSVPSRFSPECPNSSHLFLHLHTLQPEDSALYLCASSQDVTSEWVDT | |
| (IMGT) | IYFGEGSWLTVV | |
| Vβ | MXCRLLCCAVLCLLGAGELVPMETGVTQTPRHLVMGMTNKKSLKCEQHLGHN | 2576 |
| | AMYWYKQSAKKPLELMFVYSLEERVENNSVPSRFSPECPNSSHLFLHLHTLQ | 2577 |
| | PEDSALYLCASSQDVTSEWVDTIYFGEGSWLTVV | |
| | (X = any amino acid) | |
| β chain with | MGCRLLCCAVLCLLGAGELVPMETGVTQTPRHLVMGMTNKKSLKCEQHLGHN | 2578 |
| WT signal | AMYWYKQSAKKPLELMFVYSLEERVENNSVPSRFSPECPNSSHLFLHLHTLQ | |
| peptide, Cβ | PEDSALYLCASSQDVTSEWVDTIYFGEGSWLTVVEDLRNVTPPKVSLFEPSK | |
| (substituted) | AEIANKQKATLVCLARGFFPDHVELSWWVNGKEVHSGVCTDPQAYKESNYSY | |
| | CLSSRLRVSATFWHNPRNHFRCQVQFHGLSEEDKWPEGSPKPVTQNISAEAW | |
| | GRADCGITSASYQQGVLSATILYEILLGKATLYAVLVSTLVVMAMVKRKNS | |
| β chain with | MACRLLCCAVLCLLGAGELVPMETGVTQTPRHLVMGMTNKKSLKCEQHLGHN | 2579 |
| alternative | AMYWYKQSAKKPLELMFVYSLEERVENNSVPSRFSPECPNSSHLFLHLHTLQ | |
| signal peptide, | PEDSALYLCASSQDVTSEWVDTIYFGEGSWLTVVEDLRNVTPPKVSLFEPSK | |
| Cβ | AEIANKQKATLVCLARGFFPDHVELSWWVNGKEVHSGVCTDPQAYKESNYSY | |
| (substituted) | CLSSRLRVSATFWHNPRNHFRCQVQFHGLSEEDKWPEGSPKPVTQNISAEAW | |
| | GRADCGITSASYQQGVLSATILYEILLGKATLYAVLVSTLVVMAMVKRKNS | |
| β chain with | MHCRLLCCAVLCLLGAGELVPMETGVTQTPRHLVMGMTNKKSLKCEQHLGHN | 2580 |
| alternative | AMYWYKQSAKKPLELMFVYSLEERVENNSVPSRFSPECPNSSHLFLHLHTLQ | |
| signal peptide, | PEDSALYLCASSQDVTSEWVDTIYFGEGSWLTVVEDLRNVTPPKVSLFEPSK | |
| Cβ | AEIANKQKATLVCLARGFFPDHVELSWWVNGKEVHSGVCTDPQAYKESNYSY | |
| (substituted) | CLSSRLRVSATFWHNPRNHERCQVQFHGLSEEDKWPEGSPKPVTQNISAEAW | |
| | GRADCGITSASYQQGVLSATILYEILLGKATLYAVLVSTLVVMAMVKRKNS | |

[0222] In some embodiments, TCR058 interacts with and/or is specific for KRAS. In some embodiments, the peptide is from a neoantigen of KRAS. In some embodiments, the neoantigen has the amino acid change G12V relative to the wild type KRAS sequence. In some embodiments, TCR058 interacts with the neoantigen in the context of HLA-C*01:02, as described in International Publication No. WO 2021/163477, incorporated herein by reference in its entirety.

TABLE 6BG
Amino acid sequences of TCR059.

| | | SEQ |
|---|---|---|
| | | ID |
| Description | Sequence | NO: |
| CDR1α | NSASQS | 1581 |
| CDR2α | VYSSGN | 1582 |
| CDR3α | VVDDQTGANNLF | 1583 |
| Vα without | QRKEVEQDPGPFNVPEGATVAFNCTYSNSASQSFFWYRQDCRKEPKLLMSVY | 1584 |
| signal peptide | SSGNEDGRFTAQLNRASQYISLLIRDSKLSDSATYLCVVDDQTGANNLFFGT | |
| (SignalP) | GTRLTVIP | |
| Vα without | RKEVEQDPGPFNVPEGATVAFNCTYSNSASQSFFWYRQDCRKEPKLLMSVYS | 1585 |
| signal peptide | SGNEDGRFTAQLNRASQYISLLIRDSKLSDSATYLCVVDDQTGANNLFFGTG | |
| (IMGT) | TRLTVIP | |
| Vα | MXSLRVLLVILWLQLSWVWSQRKEVEQDPGPFNVPEGATVAFNCTYSNSASQ | 1586 |
| | SFFWYRQDCRKEPKLLMSVYSSGNEDGRFTAQLNRASQYISLLIRDSKLSDS | 1587 |
| | ATYLCVVDDQTGANNLFFGTGTRLTVIP | |
| | (X = any amino acid) | |
| α chain with | MISLRVLLVILWLQLSWVWSQRKEVEQDPGPFNVPEGATVAFNCTYSNSASQ | 1588 |
| WT signal | SFFWYRQDCRKEPKLLMSVYSSGNEDGRFTAQLNRASQYISLLIRDSKLSDS | |
| peptide, Cα | ATYLCVVDDQTGANNLFFGTGTRLTVIPNIQNPEPAVYQLKDPRSQDSTLCL | |
| (substituted) | FTDFDSQINVPKTMESGTFITDKCVLDMKAMDSKSNGAIAWSNQTSFTCQDI | |
| | FKETNATYPSSDVPCDATLTEKSFETDMNLNFQNLLVIVLRILLLKVAGENL | |
| | LMTLRLWSS | |
| α chain with | MASLRVLLVILWLQLSWVWSQRKEVEQDPGPFNVPEGATVAFNCTYSNSASQ | 1589 |
| alternative | SFFWYRQDCRKEPKLLMSVYSSGNEDGRFTAQLNRASQYISLLIRDSKLSDS | |
| signal peptide, | ATYLCVVDDQTGANNLFFGTGTRLTVIPNIQNPEPAVYQLKDPRSQDSTLCL | |
| Cα | FTDFDSQINVPKTMESGTFITDKCVLDMKAMDSKSNGAIAWSNQTSFTCQDI | |
| (substituted) | FKETNATYPSSDVPCDATLTEKSFETDMNLNFQNLLVIVLRILLLKVAGENL | |
| | LMTLRLWSS | |
| α chain with | MHSLRVLLVILWLQLSWVWSQRKEVEQDPGPFNVPEGATVAFNCTYSNSASQ | 1590 |
| alternative | SFFWYRQDCRKEPKLLMSVYSSGNEDGRFTAQLNRASQYISLLIRDSKLSDS | |
| signal peptide, | ATYLCVVDDQTGANNLFFGTGTRLTVIPNIQNPEPAVYQLKDPRSQDSTLCL | |
| Cα | FTDFDSQINVPKTMESGTFITDKCVLDMKAMDSKSNGAIAWSNQTSFTCQDI | |
| (substituted) | FKETNATYPSSDVPCDATLTEKSFETDMNLNFQNLLVIVLRILLLKVAGENL | |
| | LMTLRLWSS | |
| CDR1β | MNHEY | 2581 |
| CDR2β | SVGAGI | 2582 |
| CDR3β | ASRNLGDTQY | 2583 |
| Vβ without | GVTQTPKFQVLKTGQSMTLQCAQDMNHEYMSWYRQDPGMGLRLIHYSVGAGI | 2584 |
| signal peptide | TDQGEVPNGYNVSRSTTEDFPLRLLSAAPSQTSVYFCASRNLGDTQYFGPGT | |
| (SignalP) | RLTVL | |
| Vβ without | NAGVTQTPKFQVLKTGQSMTLQCAQDMNHEYMSWYRQDPGMGLRLIHYSVGA | 2585 |
| signal peptide | GITDQGEVPNGYNVSRSTTEDFPLRLLSAAPSQTSVYFCASRNLGDTQYFGP | |
| (IMGT) | GTRLTVL | |
| Vβ | MXIGLLCCAALSLLWAGPVNAGVTQTPKFQVLKTGQSMTLQCAQDMNHEYMS | 2586 |
| | WYRQDPGMGLRLIHYSVGAGITDQGEVPNGYNVSRSTTEDEPLRLLSAAPSQ | 2587 |
| | TSVYFCASRNLGDTQYFGPGTRLTVL | |
| | (X = any amino acid) | |
| β chain with | MSIGLLCCAALSLLWAGPVNAGVTQTPKFQVLKTGQSMTLQCAQDMNHEYMS | 2588 |
| WT signal | WYRQDPGMGLRLIHYSVGAGITDQGEVPNGYNVSRSTTEDFPLRLLSAAPSQ | |
| peptide, Cβ | TSVYFCASRNLGDTQYFGPGTRLTVLEDLRNVTPPKVSLFEPSKAEIANKQK | |
| (substituted) | ATLVCLARGFFPDHVELSWWVNGKEVHSGVCTDPQAYKESNYSYCLSSRLRV | |
| | SATFWHNPRNHFRCQVQFHGLSEEDKWPEGSPKPVTQNISAEAWGRADCGIT | |
| | SASYQQGVLSATILYEILLGKATLYAVLVSTLVVMAMVKRKNS | |
| β chain with | MAIGLLCCAALSLLWAGPVNAGVTQTPKFQVLKTGQSMTLQCAQDMNHEYMS | 2589 |
| alternative | WYRQDPGMGLRLIHYSVGAGITDQGEVPNGYNVSRSTTEDFPLRLLSAAPSQ | |
| signal peptide, | TSVYFCASRNLGDTQYFGPGTRLTVLEDLRNVTPPKVSLFEPSKAEIANKQK | |
| Cβ | ATLVCLARGFFPDHVELSWWVNGKEVHSGVCTDPQAYKESNYSYCLSSRLRV | |
| (substituted) | SATFWHNPRNHFRCQVQFHGLSEEDKWPEGSPKPVTQNISAEAWGRADCGIT | |
| | SASYQQGVLSATILYEILLGKATLYAVLVSTLVVMAMVKRKNS | |
| β chain with | MHIGLLCCAALSLLWAGPVNAGVTQTPKFQVLKTGQSMTLQCAQDMNHEYMS | 2590 |
| alternative | WYRQDPGMGLRLIHYSVGAGITDQGEVPNGYNVSRSTTEDFPLRLLSAAPSQ | |
| signal peptide, | TSVYFCASRNLGDTQYFGPGTRLTVLEDLRNVTPPKVSLFEPSKAEIANKQK | |
| Cβ | ATLVCLARGFFPDHVELSWWVNGKEVHSGVCTDPQAYKESNYSYCLSSRLRV | |
| (substituted) | SATFWHNPRNHFRCQVQFHGLSEEDKWPEGSPKPVTQNISAEAWGRADCGIT | |
| | SASYQQGVLSATILYEILLGKATLYAVLVSTLVVMAMVKRKNS | |

[0223] In some embodiments, TCR059 interacts with and/or is specific for KRAS. In some embodiments, the peptide is from a neoantigen of KRAS. In some embodiments, the neoantigen has the amino acid change G12V relative to the wild type KRAS sequence. In some embodiments, TCR059 interacts with the neoantigen in the context of HLA-C*01:02, as described in International Publication No. WO 2021/163477, incorporated herein by reference in its entirety.

TABLE 6BH
Amino acid sequences of TCR060.

| | | SEQ |
|---|---|---|
| | | ID |
| Description | Sequence | NO: |
| CDR1α | TSINN | 1591 |
| CDR2α | IRSNERE | 1592 |
| CDR3α | ATDGETSGSRLT | 1593 |
| Vα without | QQGEEDPQALSIQEGENATMNCSYKTSINNLQWYRQNSGRGLVHLILIRSNE | 1594 |
| signal peptide | REKHSGRLRVTLDTSKKSSSLLITASRAADTASYFCATDGETSGSRLTFGEG | |
| (SignalP) | TQLTVNP | |
| Vα without | SQQGEEDPQALSIQEGENATMNCSYKTSINNLQWYRQNSGRGLVHLILIRSN | 1595 |
| signal peptide | EREKHSGRLRVTLDTSKKSSSLLITASRAADTASYFCATDGETSGSRLTFGE | |
| (IMGT) | GTQLTVNP | |
| Vα | MXTLLGVSLVILWLQLAVNSQQGEEDPQALSIQEGENATMNCSYKTSINNLQ | 1596 |
| | WYRQNSGRGLVHLILIRSNEREKHSGRLRVTLDTSKKSSSLLITASRAADTA | 1597 |
| | SYFCATDGETSGSRLTFGEGTQLTVNP | |
| | (X = any amino acid) | |
| α chain with | METLLGVSLVILWLQLAVNSQQGEEDPQALSIQEGENATMNCSYKTSINNLQ | 1598 |
| WT signal | WYRQNSGRGLVHLILIRSNEREKHSGRLRVTLDTSKKSSSLLITASRAADTA | |
| peptide, Cα | SYFCATDGETSGSRLTFGEGTQLTVNPNIQNPEPAVYQLKDPRSQDSTLCLF | |
| (substituted) | TDFDSQINVPKTMESGTFITDKCVLDMKAMDSKSNGAIAWSNQTSFTCQDIF | |
| | KETNATYPSSDVPCDATLTEKSFETDMNLNFQNLLVIVLRILLLKVAGENLL | |
| | MTLRLWSS | |
| α chain with | MATLLGVSLVILWLQLAVNSQQGEEDPQALSIQEGENATMNCSYKTSINNLQ | 1599 |
| alternative | WYRQNSGRGLVHLILIRSNEREKHSGRLRVTLDTSKKSSSLLITASRAADTA | |
| signal peptide, | SYFCATDGETSGSRLTFGEGTQLTVNPNIQNPEPAVYQLKDPRSQDSTLCLF | |
| Cα | TDFDSQINVPKTMESGTFITDKCVLDMKAMDSKSNGAIAWSNQTSFTCQDIE | |
| (substituted) | KETNATYPSSDVPCDATLTEKSFETDMNLNFQNLLVIVLRILLLKVAGENLL | |
| | MTLRLWSS | |
| α chain with | MHTLLGVSLVILWLQLAVNSQQGEEDPQALSIQEGENATMNCSYKTSINNLQ | 1600 |
| alternative | WYRQNSGRGLVHLILIRSNEREKHSGRLRVTLDTSKKSSSLLITASRAADTA | |
| signal peptide, | SYFCATDGETSGSRLTFGEGTQLTVNPNIQNPEPAVYQLKDPRSQDSTLCLF | |
| Cα | TDFDSQINVPKTMESGTFITDKCVLDMKAMDSKSNGAIAWSNQTSFTCQDIF | |
| (substituted) | KETNATYPSSDVPCDATLTEKSFETDMNLNFQNLLVIVLRILLLKVAGENLL | |
| | MTLRLWSS | |
| CDR1β | DFQATT | 2591 |
| CDR2β | SNEGSKA | 2592 |
| CDR3β | SASRGATGQPQH | 2593 |
| Vβ without | GSGLGAVVSQHPSWVICKSGTSVKIECRSLDFQATTMFWYRQFPKQSLMLMA | 2594 |
| signal peptide | TSNEGSKATYEQGVEKDKFLINHASLTLSTLTVTSAHPEDSSFYICSASRGA | |
| (SignalP) | TGQPQHFGDGTRLSIL | |
| Vβ without | GAVVSQHPSWVICKSGTSVKIECRSLDFQATTMFWYRQFPKQSLMLMATSNE | 2595 |
| signal peptide | GSKATYEQGVEKDKFLINHASLTLSTLTVTSAHPEDSSFYICSASRGATGQP | |
| (IMGT) | QHFGDGTRLSIL | |
| Vβ | MXLLLLLLGPGISLLLPGSLAGSGLGAVVSQHPSWVICKSGTSVKIECRSLD | 2596 |
| | FQATTMFWYRQFPKQSLMLMATSNEGSKATYEQGVEKDKFLINHASLTLSTL | 2597 |
| | TVTSAHPEDSSFYICSASRGATGQPQHFGDGTRLSIL | |
| | (X = any amino acid) | |
| β chain with | MLLLLLLLGPGISLLLPGSLAGSGLGAVVSQHPSWVICKSGTSVKIECRSLD | 2598 |
| WT signal | FQATTMFWYRQFPKQSLMLMATSNEGSKATYEQGVEKDKFLINHASLTLSTL | |
| peptide, Cβ | TVTSAHPEDSSFYICSASRGATGQPQHFGDGTRLSILEDLRNVTPPKVSLFE | |
| (substituted) | PSKAEIANKQKATLVCLARGFFPDHVELSWWVNGKEVHSGVCTDPQAYKESN | |
| | YSYCLSSRLRVSATFWHNPRNHFRCQVQFHGLSEEDKWPEGSPKPVTQNISA | |
| | EAWGRADCGITSASYQQGVLSATILYEILLGKATLYAVLVSTLVVMAMVKRK | |
| | NS | |
| β chain with | MALLLLLLGPGISLLLPGSLAGSGLGAVVSQHPSWVICKSGTSVKIECRSLD | 2599 |
| alternative | FQATTMFWYRQFPKQSLMLMATSNEGSKATYEQGVEKDKFLINHASLTLSTL | |
| signal peptide, | TVTSAHPEDSSFYICSASRGATGQPQHFGDGTRLSILEDLRNVTPPKVSLFE | |
| Cβ | PSKAEIANKQKATLVCLARGFFPDHVELSWWVNGKEVHSGVCTDPQAYKESN | |
| (substituted) | YSYCLSSRLRVSATFWHNPRNHFRCQVQFHGLSEEDKWPEGSPKPVTQNISA | |
| | EAWGRADCGITSASYQQGVLSATILYEILLGKATLYAVLVSTLVVMAMVKRK | |
| | NS | |
| β chain with | MHLLLLLLGPGISLLLPGSLAGSGLGAVVSQHPSWVICKSGTSVKIECRSLD | 2600 |
| alternative | FQATTMFWYRQFPKQSLMLMATSNEGSKATYEQGVEKDKFLINHASLTLSTL | |
| signal peptide, | TVTSAHPEDSSFYICSASRGATGQPQHFGDGTRLSILEDLRNVTPPKVSLFE | |
| Cβ | PSKAEIANKQKATLVCLARGFFPDHVELSWWVNGKEVHSGVCTDPQAYKESN | |
| (substituted) | YSYCLSSRLRVSATFWHNPRNHFRCQVQFHGLSEEDKWPEGSPKPVTQNISA | |
| | EAWGRADCGITSASYQQGVLSATILYEILLGKATLYAVLVSTLVVMAMVKRK | |
| | NS | |

[0224] In some embodiments, TCR060 interacts with and/or is specific for KRAS. In some embodiments, the peptide is from a neoantigen of KRAS. In some embodiments, the neoantigen has the amino acid change G12V relative to the wild type KRAS sequence. In some embodiments, TCR060 interacts with the neoantigen in the context of an HLA-DPA1*01:03 chain and an HLA-DPB1*03:01 chain, as described in International Publication No. WO 2021/173902, incorporated herein by reference in its entirety.

TABLE 6BI
Amino acid sequences of TCR061.

| | | SEQ |
|---|---|---|
| | | ID |
| Description | Sequence | NO: |
| CDR1α | SSNFYA | 1601 |
| CDR2α | MTLNGDE | 1602 |
| CDR3α | AFTTGNQFY | 1603 |
| Vα w/o | ILNVEQSPQSLHVQEGDSTNFTCSFPSSNFYALHWYRWETAKSPEALFVMTL | 1604 |
| signal peptide | NGDEKKKGRISATLNTKEGYSYLYIKGSQPEDSATYLCAFTTGNQFYFGTGT | |
| (SignalP) | SLTVIP | |
| Vα w/o | ILNVEQSPQSLHVQEGDSTNFTCSFPSSNFYALHWYRWETAKSPEALFVMTL | 1605 |
| signal peptide | NGDEKKKGRISATLNTKEGYSYLYIKGSQPEDSATYLCAFTTGNQFYFGTGT | |
| (IMGT) | SLTVIP | |
| Vα | MXKNPLAAPLLILWFHLDCVSSILNVEQSPQSLHVQEGDSTNFTCSFPSSNF | 1606 |
| | YALHWYRWETAKSPEALFVMTLNGDEKKKGRISATLNTKEGYSYLYIKGSQP | 1607 |
| | EDSATYLCAFTTGNQFYFGTGTSLTVIP | |
| | (X = any amino acid) | |
| α chain w/ | MEKNPLAAPLLILWFHLDCVSSILNVEQSPQSLHVQEGDSTNFTCSFPSSNF | 1608 |
| WT signal | YALHWYRWETAKSPEALFVMTLNGDEKKKGRISATLNTKEGYSYLYIKGSQP | |
| peptide, Cα | EDSATYLCAFTTGNQFYFGTGTSLTVIPNIQNPEPAVYQLKDPRSQDSTLCL | |
| (substituted) | FTDFDSQINVPKTMESGTFITDKCVLDMKAMDSKSNGAIAWSNQTSFTCQDI | |
| | FKETNATYPSSDVPCDATLTEKSFETDMNLNFQNLLVIVLRILLLKVAGENL | |
| | LMTLRLWSS | |
| α chain w/ | MAKNPLAAPLLILWFHLDCVSSILNVEQSPQSLHVQEGDSTNFTCSFPSSNF | 1609 |
| alternative | YALHWYRWETAKSPEALFVMTLNGDEKKKGRISATLNTKEGYSYLYIKGSQP | |
| signal peptide, | EDSATYLCAFTTGNQFYFGTGTSLTVIPNIQNPEPAVYQLKDPRSQDSTLCL | |
| Cα | FTDFDSQINVPKTMESGTFITDKCVLDMKAMDSKSNGAIAWSNQTSFTCQDI | |
| (substituted) | FKETNATYPSSDVPCDATLTEKSFETDMNLNFQNLLVIVLRILLLKVAGENL | |
| | LMTLRLWSS | |
| α chain w/ | MHKNPLAAPLLILWFHLDCVSSILNVEQSPQSLHVQEGDSTNFTCSFPSSNF | 1610 |
| alternative | YALHWYRWETAKSPEALFVMTLNGDEKKKGRISATLNTKEGYSYLYIKGSQP | |
| signal peptide, | EDSATYLCAFTTGNQFYFGTGTSLTVIPNIQNPEPAVYQLKDPRSQDSTLCL | |
| Cα | FTDFDSQINVPKTMESGTFITDKCVLDMKAMDSKSNGAIAWSNQTSFTCQDI | |
| (substituted) | FKETNATYPSSDVPCDATLTEKSFETDMNLNFQNLLVIVLRILLLKVAGENL | |
| | LMTLRLWSS | |
| CDR1β | SGHDYL | 2601 |
| CDR2β | FNNNVP | 2602 |
| CDR3β | ASSSYGGYSNQPQH | 2603 |
| Vβ w/o | GVIQSPRHEVTEMGQEVTLRCKPISGHDYLFWYRQTMMRGLELLIYENNNVP | 2604 |
| signal peptide | IDDSGMPEDRFSAKMPNASFSTLKIQPSEPRDSAVYFCASSSYGGYSNQPQH | |
| (SignalP) | FGDGTRLSIL | |
| Vβ w/o | DAGVIQSPRHEVTEMGQEVTLRCKPISGHDYLFWYRQTMMRGLELLIYENNN | 2605 |
| signal peptide | VPIDDSGMPEDRFSAKMPNASFSTLKIQPSEPRDSAVYFCASSSYGGYSNQP | |
| (IMGT) | QHFGDGTRLSIL | |
| Vβ | MXSWTLCCVSLCILVAKHTDAGVIQSPRHEVTEMGQEVTLRCKPISGHDYLF | 2606 |
| | WYRQTMMRGLELLIYFNNNVPIDDSGMPEDRFSAKMPNASFSTLKIQPSEPR | 2607 |
| | DSAVYFCASSSYGGYSNQPQHFGDGTRLSIL | |
| | (X = any amino acid) | |
| β chain w/ | MGSWTLCCVSLCILVAKHTDAGVIQSPRHEVTEMGQEVTLRCKPISGHDYLF | 2608 |
| WT signal | WYRQTMMRGLELLIYFNNNVPIDDSGMPEDRFSAKMPNASFSTLKIQPSEPR | |
| peptide, Cβ | DSAVYFCASSSYGGYSNQPQHFGDGTRLSILEDLRNVTPPKVSLFEPSKAEI | |
| (substituted) | ANKQKATLVCLARGFFPDHVELSWWVNGKEVHSGVCTDPQAYKESNYSYCLS | |
| | SRLRVSATFWHNPRNHFRCQVQFHGLSEEDKWPEGSPKPVTQNISAEAWGRA | |
| | DCGITSASYQQGVLSATILYEILLGKATLYAVLVSTLVVMAMVKRKNS | |
| β chain w/ | MASWTLCCVSLCILVAKHTDAGVIQSPRHEVTEMGQEVTLRCKPISGHDYLF | 2609 |
| alternative | WYRQTMMRGLELLIYENNNVPIDDSGMPEDRFSAKMPNASESTLKIQPSEPR | |
| signal peptide, | DSAVYFCASSSYGGYSNQPQHFGDGTRLSILEDLRNVTPPKVSLFEPSKAEI | |
| Cβ | ANKQKATLVCLARGFFPDHVELSWWVNGKEVHSGVCTDPQAYKESNYSYCLS | |
| (substituted) | SRLRVSATFWHNPRNHFRCQVQFHGLSEEDKWPEGSPKPVTQNISAEAWGRA | |
| | DCGITSASYQQGVLSATILYEILLGKATLYAVLVSTLVVMAMVKRKNS | |
| β chain w/ | MHSWTLCCVSLCILVAKHTDAGVIQSPRHEVTEMGQEVTLRCKPISGHDYLF | 2610 |
| alternative | WYRQTMMRGLELLIYENNNVPIDDSGMPEDRESAKMPNASESTLKIQPSEPR | |
| signal peptide, | DSAVYFCASSSYGGYSNQPQHFGDGTRLSILEDLRNVTPPKVSLFEPSKAEI | |
| Cβ | ANKQKATLVCLARGFFPDHVELSWWVNGKEVHSGVCTDPQAYKESNYSYCLS | |
| (substituted) | SRLRVSATFWHNPRNHFRCQVQFHGLSEEDKWPEGSPKPVTQNISAEAWGRA | |
| | DCGITSASYQQGVLSATILYEILLGKATLYAVLVSTLVVMAMVKRKNS | |

[0225] In some embodiments, TCR061 interacts with and/or is specific for tumor protein KRAS (KRAS). In some embodiments, the peptide is from a neoantigen of KRAS. In some embodiments, the neoantigen has the amino acid change G12C relative to the wild type KRAS sequence. In some embodiments, TCR061 interacts with the neoantigen in the context of HLA-DRB1*11:01 as described in International Publication No. WO 2019/060349, incorporated herein by reference in its entirety.

TABLE 6BJ
Amino acid sequences of TCR062.

| | | SEQ |
|---|---|---|
| | | ID |
| Description | Sequence | NO: |
| CDR1α | NIATNDY | 1611 |
| CDR2α | GYKTK | 1612 |
| CDR3α | LVGDMDQAGTALI | 1613 |
| Vα w/o | KTTQPISMDSYEGQEVNITCSHNNIATNDYITWYQQFPSQGPRFIIQGYKTK | 1614 |
| signal peptide | VTNEVASLFIPADRKSSTLSLPRVSLSDTAVYYCLVGDMDQAGTALIFGKGT | |
| (SignalP) | TLSVSS | |
| Vα w/o | LAKTTQPISMDSYEGQEVNITCSHNNIATNDYITWYQQFPSQGPRFIIQGYK | 1615 |
| signal peptide | TKVTNEVASLFIPADRKSSTLSLPRVSLSDTAVYYCLVGDMDQAGTALIFGK | |
| (IMGT) | GTTLSVSS | |
| Vα | MXQVARVIVELTLSTLSLAKTTQPISMDSYEGQEVNITCSHNNIATNDYITW | 1616 |
| | YQQFPSQGPRFIIQGYKTKVTNEVASLFIPADRKSSTLSLPRVSLSDTAVYY | 1617 |
| | CLVGDMDQAGTALIFGKGTTLSVSS | |
| | (X = any amino acid) | |
| α chain w/ | MRQVARVIVELTLSTLSLAKTTQPISMDSYEGQEVNITCSHNNIATNDYITW | 1618 |
| WT signal | YQQFPSQGPRFIIQGYKTKVTNEVASLFIPADRKSSTLSLPRVSLSDTAVYY | |
| peptide, Cα | CLVGDMDQAGTALIFGKGTTLSVSSNIQNPEPAVYQLKDPRSQDSTLCLFTD | |
| (substituted) | FDSQINVPKTMESGTFITDKCVLDMKAMDSKSNGAIAWSNQTSFTCQDIFKE | |
| | TNATYPSSDVPCDATLTEKSFETDMNLNFQNLLVIVLRILLLKVAGENLLMT | |
| | LRLWSS | |
| α chain w/ | MAQVARVIVELTLSTLSLAKTTQPISMDSYEGQEVNITCSHNNIATNDYITW | 1619 |
| alternative | YQQFPSQGPRFIIQGYKTKVTNEVASLFIPADRKSSTLSLPRVSLSDTAVYY | |
| signal peptide, | CLVGDMDQAGTALIFGKGTTLSVSSNIQNPEPAVYQLKDPRSQDSTLCLFTD | |
| Cα | FDSQINVPKTMESGTFITDKCVLDMKAMDSKSNGAIAWSNQTSFTCQDIFKE | |
| (substituted) | TNATYPSSDVPCDATLTEKSFETDMNLNFQNLLVIVLRILLLKVAGENLLMT | |
| | LRLWSS | |
| α chain w/ | MHQVARVIVELTLSTLSLAKTTQPISMDSYEGQEVNITCSHNNIATNDYITW | 1620 |
| alternative | YQQFPSQGPRFIIQGYKTKVTNEVASLFIPADRKSSTLSLPRVSLSDTAVYY | |
| signal peptide, | CLVGDMDQAGTALIFGKGTTLSVSSNIQNPEPAVYQLKDPRSQDSTLCLFTD | |
| Cα | FDSQINVPKTMESGTFITDKCVLDMKAMDSKSNGAIAWSNQTSFTCQDIFKE | |
| (substituted) | TNATYPSSDVPCDATLTEKSFETDMNLNFQNLLVIVLRILLLKVAGENLLMT | |
| | LRLWSS | |
| CDR1β | SGHDT | 2611 |
| CDR2β | YYEEEE | 2612 |
| CDR3β | ASSLGEGRVDGYT | 2613 |
| Vβ w/o | GVTQSPTHLIKTRGQQVTLRCSPKSGHDTVSWYQQALGQGPQFIFQYYEEEE | 2614 |
| signal peptide | RQRGNFPDRFSGHQFPNYSSELNVNALLLGDSALYLCASSLGEGRVDGYTFG | |
| (SignalP) | SGTRLTVV | |
| Vβ w/o | DAGVTQSPTHLIKTRGQQVTLRCSPKSGHDTVSWYQQALGQGPQFIFQYYEE | 2615 |
| signal peptide | EERQRGNFPDRFSGHQFPNYSSELNVNALLLGDSALYLCASSLGEGRVDGYT | |
| (IMGT) | FGSGTRLTVV | |
| Vβ | MXPGLLCWALLCLLGAGLVDAGVTQSPTHLIKTRGQQVTLRCSPKSGHDTVS | 2616 |
| | WYQQALGQGPQFIFQYYEEEERQRGNFPDRFSGHQFPNYSSELNVNALLLGD | |
| | SALYLCASSLGEGRVDGYTFGSGTRLTVV | 2617 |
| | (X = any amino acid) | |
| β chain w/ | MGPGLLCWALLCLLGAGLVDAGVTQSPTHLIKTRGQQVTLRCSPKSGHDTVS | 2618 |
| WT signal | WYQQALGQGPQFIFQYYEEEERQRGNFPDRFSGHQFPNYSSELNVNALLLGD | |
| peptide, Cβ | SALYLCASSLGEGRVDGYTFGSGTRLTVVEDLRNVTPPKVSLFEPSKAEIAN | |
| (substituted) | KQKATLVCLARGFFPDHVELSWWVNGKEVHSGVCTDPQAYKESNYSYCLSSR | |
| | LRVSATFWHNPRNHFRCQVQFHGLSEEDKWPEGSPKPVTQNISAEAWGRADC | |
| | GITSASYQQGVLSATILYEILLGKATLYAVLVSTLVVMAMVKRKNS | |
| β chain w/ | MAPGLLCWALLCLLGAGLVDAGVTQSPTHLIKTRGQQVTLRCSPKSGHDTVS | 2619 |
| alternative | WYQQALGQGPQFIFQYYEEEERQRGNFPDRESGHQFPNYSSELNVNALLLGD | |
| signal peptide, | SALYLCASSLGEGRVDGYTFGSGTRLTVVEDLRNVTPPKVSLFEPSKAEIAN | |
| Cβ | KQKATLVCLARGFFPDHVELSWWVNGKEVHSGVCTDPQAYKESNYSYCLSSR | |
| (substituted) | LRVSATFWHNPRNHFRCQVQFHGLSEEDKWPEGSPKPVTQNISAEAWGRADC | |
| | GITSASYQQGVLSATILYEILLGKATLYAVLVSTLVVMAMVKRKNS | |
| β chain w/ | MHPGLLCWALLCLLGAGLVDAGVTQSPTHLIKTRGQQVTLRCSPKSGHDTVS | 2620 |
| alternative | WYQQALGQGPQFIFQYYEEEERQRGNFPDRESGHQFPNYSSELNVNALLLGD | |
| signal peptide, | SALYLCASSLGEGRVDGYTFGSGTRLTVVEDLRNVTPPKVSLFEPSKAEIAN | |
| Cβ | KQKATLVCLARGFFPDHVELSWWVNGKEVHSGVCTDPQAYKESNYSYCLSSR | |
| (substituted) | LRVSATFWHNPRNHFRCQVQFHGLSEEDKWPEGSPKPVTQNISAEAWGRADC | |
| | GITSASYQQGVLSATILYEILLGKATLYAVLVSTLVVMAMVKRKNS | |

[0226] In some embodiments, TCR062 interacts with and/or is specific for KRAS. In some embodiments, the peptide is from a neoantigen of KRAS. In some embodiments, the neoantigen has the amino acid change G12D relative to the wild type KRAS sequence. In some embodiments, TCR062 interacts with the neoantigen in the context of HLA-C*08:02 as described in International Publication No. WO 2018/026691, incorporated herein by reference in its entirety.

TABLE 6BK
Amino acid sequences of TCR063.

| | | SEQ |
|---|---|---|
| | | ID |
| Description | Sequence | NO: |
| CDR1α | NIATNDY | 1621 |
| CDR2α | GYKTK | 1622 |
| CDR3α | LVGDMDQAGTALI | 1623 |
| Vα w/o | KTTQPISMDSYEGQEVNITCSHNNIATNDYITWYQQFPSQGPRFIIQGYKTK | 1624 |
| signal peptide | VTNEVASLFIPADRKSSTLSLPRVSLSDTAVYYCLVGDMDQAGTALIFGKGT | |
| (SignalP) | TLSVSS | |
| Vα w/o | LAKTTQPISMDSYEGQEVNITCSHNNIATNDYITWYQQFPSQGPRFIIQGYK | 1625 |
| signal peptide | TKVTNEVASLFIPADRKSSTLSLPRVSLSDTAVYYCLVGDMDQAGTALIFGK | |
| (IMGT) | GTTLSVSS | |
| Vα | MXQVARVIVFLTLSTLSLAKTTQPISMDSYEGQEVNITCSHNNIATNDYITW | 1626 |
| | YQQFPSQGPRFIIQGYKTKVTNEVASLFIPADRKSSTLSLPRVSLSDTAVYY | 1627 |
| | CLVGDMDQAGTALIFGKGTTLSVSS | |
| | (X = any amino acid) | |
| α chain w/ | MRQVARVIVELTLSTLSLAKTTQPISMDSYEGQEVNITCSHNNIATNDYITW | 1628 |
| WT signal | YQQFPSQGPRFIIQGYKTKVTNEVASLFIPADRKSSTLSLPRVSLSDTAVYY | |
| peptide, Cα | CLVGDMDQAGTALIFGKGTTLSVSSNIQNPEPAVYQLKDPRSQDSTLCLFTD | |
| (substituted) | FDSQINVPKTMESGTFITDKCVLDMKAMDSKSNGAIAWSNQTSFTCQDIFKE | |
| | TNATYPSSDVPCDATLTEKSFETDMNLNFQNLLVIVLRILLLKVAGENLLMT | |
| | LRLWSS | |
| α chain w/ | MAQVARVIVELTLSTLSLAKTTQPISMDSYEGQEVNITCSHNNIATNDYITW | 1629 |
| alternative | YQQFPSQGPRFIIQGYKTKVTNEVASLFIPADRKSSTLSLPRVSLSDTAVYY | |
| signal peptide, | CLVGDMDQAGTALIFGKGTTLSVSSNIQNPEPAVYQLKDPRSQDSTLCLFTD | |
| Cα | FDSQINVPKTMESGTFITDKCVLDMKAMDSKSNGAIAWSNQTSFTCQDIFKE | |
| (substituted) | TNATYPSSDVPCDATLTEKSFETDMNLNFQNLLVIVLRILLLKVAGENLLMT | |
| | LRLWSS | |
| α chain w/ | MHQVARVIVFLTLSTLSLAKTTQPISMDSYEGQEVNITCSHNNIATNDYITW | 1630 |
| alternative | YQQFPSQGPRFIIQGYKTKVTNEVASLFIPADRKSSTLSLPRVSLSDTAVYY | |
| signal peptide, | CLVGDMDQAGTALIFGKGTTLSVSSNIQNPEPAVYQLKDPRSQDSTLCLFTD | |
| Cα | FDSQINVPKTMESGTFITDKCVLDMKAMDSKSNGAIAWSNQTSFTCQDIFKE | |
| (substituted) | TNATYPSSDVPCDATLTEKSFETDMNLNFQNLLVIVLRILLLKVAGENLLMT | |
| | LRLWSS | |
| CDR1β | SGHDT | 2621 |
| CDR2β | YYEEEE | 2622 |
| CDR3β | ASSLGRASNQPQH | 2623 |
| Vβ w/o | GVTQSPTHLIKTRGQQVTLRCSPKSGHDTVSWYQQALGQGPQFIFQYYEEEE | 2624 |
| signal peptide | RQRGNFPDRESGHQFPNYSSELNVNALLLGDSALYLCASSLGRASNQPQHFG | |
| (SignalP) | DGTRLSIL | |
| Vβ w/o | DAGVTQSPTHLIKTRGQQVTLRCSPKSGHDTVSWYQQALGQGPQFIFQYYEE | 2625 |
| signal peptide | EERQRGNFPDRESGHQFPNYSSELNVNALLLGDSALYLCASSLGRASNQPQH | |
| (IMGT) | FGDGTRLSIL | |
| Vβ | MXPGLLCWALLCLLGAGLVDAGVTQSPTHLIKTRGQQVTLRCSPKSGHDTVS | 2626 |
| | WYQQALGQGPQFIFQYYEEEERQRGNFPDRESGHQFPNYSSELNVNALLLGD | 2627 |
| | SALYLCASSLGRASNQPQHFGDGTRLSIL | |
| | (X = any amino acid) | |
| β chain w/ | MGPGLLCWALLCLLGAGLVDAGVTQSPTHLIKTRGQQVTLRCSPKSGHDTVS | 2628 |
| WT signal | WYQQALGQGPQFIFQYYEEEERQRGNFPDRFSGHQFPNYSSELNVNALLLGD | |
| peptide, Cβ | SALYLCASSLGRASNQPQHFGDGTRLSILEDLRNVTPPKVSLFEPSKAEIAN | |
| (substituted) | KQKATLVCLARGFFPDHVELSWWVNGKEVHSGVCTDPQAYKESNYSYCLSSR | |
| | LRVSATFWHNPRNHFRCQVQFHGLSEEDKWPEGSPKPVTQNISAEAWGRADC | |
| | GITSASYQQGVLSATILYEILLGKATLYAVLVSTLVVMAMVKRKNS | |
| β chain w/ | MAPGLLCWALLCLLGAGLVDAGVTQSPTHLIKTRGQQVTLRCSPKSGHDTVS | 2629 |
| alternative | WYQQALGQGPQFIFQYYEEEERQRGNFPDRESGHQFPNYSSELNVNALLLGD | |
| signal peptide, | SALYLCASSLGRASNQPQHFGDGTRLSILEDLRNVTPPKVSLFEPSKAEIAN | |
| Cβ | KQKATLVCLARGFFPDHVELSWWVNGKEVHSGVCTDPQAYKESNYSYCLSSR | |
| (substituted) | LRVSATFWHNPRNHFRCQVQFHGLSEEDKWPEGSPKPVTQNISAEAWGRADC | |
| | GITSASYQQGVLSATILYEILLGKATLYAVLVSTLVVMAMVKRKNS | |
| β chain w/ | MHPGLLCWALLCLLGAGLVDAGVTQSPTHLIKTRGQQVTLRCSPKSGHDTVS | 2630 |
| alternative | WYQQALGQGPQFIFQYYEEEERQRGNFPDRESGHQFPNYSSELNVNALLLGD | |
| signal peptide, | SALYLCASSLGRASNQPQHFGDGTRLSILEDLRNVTPPKVSLFEPSKAEIAN | |
| Cβ | KQKATLVCLARGFFPDHVELSWWVNGKEVHSGVCTDPQAYKESNYSYCLSSR | |
| (substituted) | LRVSATFWHNPRNHFRCQVQFHGLSEEDKWPEGSPKPVTQNISAEAWGRADC | |
| | GITSASYQQGVLSATILYEILLGKATLYAVLVSTLVVMAMVKRKNS | |

[0227] In some embodiments, TCR063 interacts with and/or is specific for KRAS. In some embodiments, the peptide is from a neoantigen of KRAS. In some embodiments, the neoantigen has the amino acid change G12D relative to the wild type KRAS sequence. In some embodiments, TCR063 interacts with the neoantigen in the context of HLA-C*08:02 as described in International Publication No. WO 2018/026691, incorporated herein by reference in its entirety.

TABLE 6BL
Amino acid sequences of TCR064.

| | | SEQ |
|---|---|---|
| Description | Sequence | ID NO: |
| CDR1α | NIATNDY | 1631 |
| CDR2α | GYKTK | 1632 |
| CDR3α | LVGDRDQAGTALI | 1633 |
| Vα w/o signal peptide | KTTQPISMDSYEGQEVNITCSHNNIATNDYITWYQQFPSQGPRFIIQGYKTK | 1634 |
| (SignalP) | VTNEVASLFIPADRKSSTLSLPRVSLSDTAVYYCLVGDRDQAGTALIFGKGT | |
| | TLSVSS | |
| Vα w/o signal peptide | LAKTTQPISMDSYEGQEVNITCSHNNIATNDYITWYQQFPSQGPRFIIQGYK | 1635 |
| (IMGT) | TKVTNEVASLFIPADRKSSTLSLPRVSLSDTAVYYCLVGDRDQAGTALIFGK | |
| | GTTLSVSS | |
| Vα | MXQVARVIVFLTLSTLSLAKTTQPISMDSYEGQEVNITCSHNNIATNDYITW | 1636 |
| | YQQFPSQGPRFIIQGYKTKVTNEVASLFIPADRKSSTLSLPRVSLSDTAVYY | 1637 |
| | CLVGDRDQAGTALIFGKGTTLSVSS | |
| | (X = any amino acid) | |
| α chain w/WT signal | MRQVARVIVFLTLSTLSLAKTTQPISMDSYEGQEVNITCSHNNIATNDYITW | 1638 |
| peptide, Cα | YQQFPSQGPRFIIQGYKTKVTNEVASLFIPADRKSSTLSLPRVSLSDTAVYY | |
| (substituted) | CLVGDRDQAGTALIFGKGTTLSVSSNIQNPEPAVYQLKDPRSQDSTLCLFTD | |
| | FDSQINVPKTMESGTFITDKCVLDMKAMDSKSNGAIAWSNQTSFTCQDIFKE | |
| | TNATYPSSDVPCDATLTEKSFETDMNLNFQNLLVIVLRILLLKVAGFNLLMT | |
| | LRLWSS | |
| α chain w/alternative | MAQVARVIVFLTLSTLSLAKTTQPISMDSYEGQEVNITCSHNNIATNDYITW | 1639 |
| signal peptide, Cα | YQQFPSQGPRFIIQGYKTKVTNEVASLFIPADRKSSTLSLPRVSLSDTAVYY | |
| (substituted) | CLVGDRDQAGTALIFGKGTTLSVSSNIQNPEPAVYQLKDPRSQDSTLCLFTD | |
| | FDSQINVPKTMESGTFITDKCVLDMKAMDSKSNGAIAWSNQTSFTCQDIFKE | |
| | TNATYPSSDVPCDATLTEKSFETDMNLNFQNLLVIVLRILLLKVAGFNLLMT | |
| | LRLWSS | |
| α chain w/alternative | MHQVARVIVFLTLSTLSLAKTTQPISMDSYEGQEVNITCSHNNIATNDYITW | 1640 |
| signal peptide, Cα | YQQFPSQGPRFIIQGYKTKVTNEVASLFIPADRKSSTLSLPRVSLSDTAVYY | |
| (substituted) | CLVGDRDQAGTALIFGKGTTLSVSSNIQNPEPAVYQLKDPRSQDSTLCLFTD | |
| | FDSQINVPKTMESGTFITDKCVLDMKAMDSKSNGAIAWSNQTSFTCQDIFKE | |
| | TNATYPSSDVPCDATLTEKSFETDMNLNFQNLLVIVLRILLLKVAGFNLLMT | |
| | LRLWSS | |
| CDR1ß | SGHDT | 2631 |
| CDR2ß | YYEEEE | 2632 |
| CDR3ß | ASSFGQSSTYGYT | 2633 |
| Vß w/o signal peptide | GVTQSPTHLIKTRGQQVTLRCSPKSGHDTVSWYQQALGQGPQFIFQYYEEEE | 2634 |
| (SignalP) | RQRGNFPDRFSGHQFPNYSSELNVNALLLGDSALYLCASSFGQSSTYGYTFG | |
| | SGTRLTVV | |
| Vß w/o signal peptide | DAGVTQSPTHLIKTRGQQVTLRCSPKSGHDTVSWYQQALGQGPQFIFQYYEE | 2635 |
| (IMGT) | EERQRGNFPDRFSGHQFPNYSSELNVNALLLGDSALYLCASSFGQSSTYGYT | |
| | FGSGTRLTVV | |
| Vß | MXPGLLCWALLCLLGAGLVDAGVTQSPTHLIKTRGQQVTLRCSPKSGHDTVS | 2636 |
| | WYQQALGQGPQFIFQYYEEEERQRGNFPDRFSGHQFPNYSSELNVNALLLGD | 2637 |
| | SALYLCASSFGQSSTYGYTFGSGTRLTVV | |
| | (X = any amino acid) | |
| ß chain w/WT signal | MGPGLLCWALLCLLGAGLVDAGVTQSPTHLIKTRGQQVTLRCSPKSGHDTVS | 2638 |
| peptide, Cß | WYQQALGQGPQFIFQYYEEEERQRGNFPDRFSGHQFPNYSSELNVNALLLGD | |
| (substituted) | SALYLCASSFGQSSTYGYTFGSGTRLTVVEDLRNVTPPKVSLFEPSKAEIAN | |
| | KQKATLVCLARGFFPDHVELSWWVNGKEVHSGVCTDPQAYKESNYSYCLSSR | |
| | LRVSATFWHNPRNHFRCQVQFHGLSEEDKWPEGSPKPVTQNISAEAWGRADC | |
| | GITSASYQQGVLSATILYEILLGKATLYAVLVSTLVVMAMVKRKNS | |
| ß chain w/alternative | MAPGLLCWALLCLLGAGLVDAGVTQSPTHLIKTRGQQVTLRCSPKSGHDTVS | 2639 |
| signal peptide, Cß | WYQQALGQGPQFIFQYYEEEERQRGNFPDRFSGHQFPNYSSELNVNALLLGD | |
| (substituted) | SALYLCASSFGQSSTYGYTFGSGTRLTVVEDLRNVTPPKVSLFEPSKAEIAN | |
| | KQKATLVCLARGFFPDHVELSWWVNGKEVHSGVCTDPQAYKESNYSYCLSSR | |
| | LRVSATFWHNPRNHFRCQVQFHGLSEEDKWPEGSPKPVTQNISAEAWGRADC | |
| | GITSASYQQGVLSATILYEILLGKATLYAVLVSTLVVMAMVKRKNS | |
| ß chain w/alternative | MHPGLLCWALLCLLGAGLVDAGVTQSPTHLIKTRGQQVTLRCSPKSGHDTVS | 2640 |
| signal peptide, Cß | WYQQALGQGPQFIFQYYEEEERQRGNFPDRFSGHQFPNYSSELNVNALLLGD | |
| (substituted) | SALYLCASSFGQSSTYGYTFGSGTRLTVVEDLRNVTPPKVSLFEPSKAEIAN | |
| | KQKATLVCLARGFFPDHVELSWWVNGKEVHSGVCTDPQAYKESNYSYCLSSR | |
| | LRVSATFWHNPRNHFRCQVQFHGLSEEDKWPEGSPKPVTQNISAEAWGRADC | |
| | GITSASYQQGVLSATILYEILLGKATLYAVLVSTLVVMAMVKRKNS | |

[0228] In some embodiments, TCR064 interacts with and/or is specific for KRAS. In some embodiments, the peptide is from a neoantigen of KRAS. In some embodiments, the neoantigen has the amino acid change G12D relative to the wild type KRAS sequence. In some embodiments, TCR064 interacts with the neoantigen in the context of HLA-C*08:02 as described in International Publication No. WO 2018/026691, incorporated herein by reference in its entirety.

TABLE 6BM
Amino acid sequences of TCR065.

| | | SEQ |
|---|---|---|
| Description | Sequence | ID NO: |
| CDR1α | NIATNDY | 1641 |
| CDR2α | GYKTK | 1642 |
| CDR3α | LVGDMDQAGTALI | 1643 |
| Vα w/o signal peptide | KTTQPISMDSYEGQEVNITCSHNNIATNDYITWYQQFPSQGPRFIIQGYKTK | 1644 |
| (SignalP) | VTNEVASLFIPADRKSSTLSLPRVSLSDTAVYYCLVGDMDQAGTALIFGKGT | |
| | TLSVSS | |
| Vα w/o signal peptide | LAKTTQPISMDSYEGQEVNITCSHNNIATNDYITWYQQFPSQGPRFIIQGYK | 1645 |
| (IMGT) | TKVTNEVASLFIPADRKSSTLSLPRVSLSDTAVYYCLVGDMDQAGTALIFGK | |
| | GTTLSVSS | |
| Vα | MXQVARVIVFLTLSTLSLAKTTQPISMDSYEGQEVNITCSHNNIATNDYITW | 1646 |
| | YQQFPSQGPRFIIQGYKTKVTNEVASLFIPADRKSSTLSLPRVSLSDTAVYY | 1647 |
| | CLVGDMDQAGTALIFGKGTTLSVSS | |
| | (X = any amino acid) | |
| α chain w/WT signal | MRQVARVIVFLTLSTLSLAKTTQPISMDSYEGQEVNITCSHNNIATNDYITW | 1648 |
| peptide, Cα | YQQFPSQGPRFIIQGYKTKVTNEVASLFIPADRKSSTLSLPRVSLSDTAVYY | |
| (substituted) | CLVGDMDQAGTALIFGKGTTLSVSSNIQNPEPAVYQLKDPRSQDSTLCLFTD | |
| | FDSQINVPKTMESGTFITDKCVLDMKAMDSKSNGAIAWSNQTSFTCQDIFKE | |
| | TNATYPSSDVPCDATLTEKSFETDMNLNFQNLLVIVLRILLLKVAGFNLLMT | |
| | LRLWSS | |
| α chain w/alternative | MAQVARVIVFLTLSTLSLAKTTQPISMDSYEGQEVNITCSHNNIATNDYITW | 1649 |
| signal peptide, Cα | YQQFPSQGPRFIIQGYKTKVTNEVASLFIPADRKSSTLSLPRVSLSDTAVYY | |
| (substituted) | CLVGDMDQAGTALIFGKGTTLSVSSNIQNPEPAVYQLKDPRSQDSTLCLFTD | |
| | FDSQINVPKTMESGTFITDKCVLDMKAMDSKSNGAIAWSNQTSFTCQDIFKE | |
| | TNATYPSSDVPCDATLTEKSFETDMNLNFQNLLVIVLRILLLKVAGFNLLMT | |
| | LRLWSS | |
| α chain w/alternative | MHQVARVIVFLTLSTLSLAKTTQPISMDSYEGQEVNITCSHNNIATNDYITW | 1650 |
| signal peptide, Cα | YQQFPSQGPRFIIQGYKTKVTNEVASLFIPADRKSSTLSLPRVSLSDTAVYY | |
| (substituted) | CLVGDMDQAGTALIFGKGTTLSVSSNIQNPEPAVYQLKDPRSQDSTLCLFTD | |
| | FDSQINVPKTMESGTFITDKCVLDMKAMDSKSNGAIAWSNQTSFTCQDIFKE | |
| | TNATYPSSDVPCDATLTEKSFETDMNLNFQNLLVIVLRILLLKVAGFNLLMT | |
| | LRLWSS | |
| CDR1ß | SGHDT | 2641 |
| CDR2ß | YYEEEE | 2642 |
| CDR3ß | ASSLGQTNYGYT | 2643 |
| Vß w/o signal peptide | GVTQSPTHLIKTRGQQVTLRCSPKSGHDTVSWYQQALGQGPQFIFQYYEEEE | 2644 |
| (SignalP) | RQRGNFPDRFSGHQFPNYSSELNVNALLLGDSALYLCASSLGQTNYGYTFGS | |
| | GTRLTVV | |
| Vß w/o signal peptide | DAGVTQSPTHLIKTRGQQVTLRCSPKSGHDTVSWYQQALGQGPQFIFQYYEE | 2645 |
| (IMGT) | EERQRGNFPDRFSGHQFPNYSSELNVNALLLGDSALYLCASSLGQTNYGYTF | |
| | GSGTRLTVV | |
| Vß | MXPGLLCWALLCLLGAGLVDAGVTQSPTHLIKTRGQQVTLRCSPKSGHDTVS | 2646 |
| | WYQQALGQGPQFIFQYYEEEERQRGNFPDRFSGHQFPNYSSELNVNALLLGD | 2647 |
| | SALYLCASSLGQTNYGYTFGSGTRLTVV | |
| | (X = any amino acid) | |
| ß chain w/WT signal | MGPGLLCWALLCLLGAGLVDAGVTQSPTHLIKTRGQQVTLRCSPKSGHDTVS | 2648 |
| peptide, Cß | WYQQALGQGPQFIFQYYEEEERQRGNFPDRFSGHQFPNYSSELNVNALLLGD | |
| (substituted) | SALYLCASSLGQTNYGYTFGSGTRLTVVEDLRNVTPPKVSLFEPSKAEIANK | |
| | QKATLVCLARGFFPDHVELSWWVNGKEVHSGVCTDPQAYKESNYSYCLSSRL | |
| | RVSATFWHNPRNHFRCQVQFHGLSEEDKWPEGSPKPVTQNISAEAWGRADCG | |
| | ITSASYQQGVLSATILYEILLGKATLYAVLVSTLVVMAMVKRKNS | |
| ß chain w/alternative | MAPGLLCWALLCLLGAGLVDAGVTQSPTHLIKTRGQQVTLRCSPKSGHDTVS | 2649 |
| signal peptide, Cß | WYQQALGQGPQFIFQYYEEEERQRGNFPDRFSGHQFPNYSSELNVNALLLGD | |
| (substituted) | SALYLCASSLGQTNYGYTFGSGTRLTVVEDLRNVTPPKVSLFEPSKAEIANK | |
| | QKATLVCLARGFFPDHVELSWWVNGKEVHSGVCTDPQAYKESNYSYCLSSRL | |
| | RVSATFWHNPRNHFRCQVQFHGLSEEDKWPEGSPKPVTQNISAEAWGRADCG | |
| | ITSASYQQGVLSATILYEILLGKATLYAVLVSTLVVMAMVKRKNS | |
| ß chain w/alternative | MHPGLLCWALLCLLGAGLVDAGVTQSPTHLIKTRGQQVTLRCSPKSGHDTVS | 2650 |
| signal peptide, Cß | WYQQALGQGPQFIFQYYEEEERQRGNFPDRFSGHQFPNYSSELNVNALLLGD | |
| (substituted) | SALYLCASSLGQTNYGYTFGSGTRLTVVEDLRNVTPPKVSLFEPSKAEIANK | |
| | QKATLVCLARGFFPDHVELSWWVNGKEVHSGVCTDPQAYKESNYSYCLSSRL | |
| | RVSATFWHNPRNHFRCQVQFHGLSEEDKWPEGSPKPVTQNISAEAWGRADCG | |
| | ITSASYQQGVLSATILYEILLGKATLYAVLVSTLVVMAMVKRKNS | |

[0229] In some embodiments, TCR065 interacts with and/or is specific for KRAS. In some embodiments, the peptide is from a neoantigen of KRAS. In some embodiments, the neoantigen has the amino acid change G12D relative to the wild type KRAS sequence. In some embodiments, TCR065 interacts with the neoantigen in the context of HLA-Cw*08:02 as described in International Publication No. WO 2017/048593, incorporated herein by reference in its entirety.

TABLE 6BN
Amino acid sequences of TCR066.

| | | SEQ |
|---|---|---|
| Description | Sequence | ID NO: |
| CDR1α | DRGSQS | 1651 |
| CDR2α | IYSNGD | 1652 |
| CDR3α | AAAMDSSYKLI | 1653 |
| Vα w/o signal peptide | QQKEVEQNSGPLSVPEGAIASLNCTYSDRGSQSFFWYRQYSGKSPELIMFIY | 1654 |
| (SignalP) | SNGDKEDGRFTAQLNKASQYVSLLIRDSQPSDSATYLCAAAMDSSYKLIFGS | |
| | GTRLLVRP | |
| Vα w/o signal peptide | QKEVEQNSGPLSVPEGAIASLNCTYSDRGSQSFFWYRQYSGKSPELIMFIYS | 1655 |
| (IMGT) | NGDKEDGRFTAQLNKASQYVSLLIRDSQPSDSATYLCAAAMDSSYKLIFGSG | |
| | TRLLVRP | |
| Vα | MXSLRVLLVILWLQLSWVWSQQKEVEQNSGPLSVPEGAIASLNCTYSDRGSQ | 1656 |
| | SFFWYRQYSGKSPELIMFIYSNGDKEDGRFTAQLNKASQYVSLLIRDSQPSD | 1657 |
| | SATYLCAAAMDSSYKLIFGSGTRLLVRP | |
| | (X = any amino acid) | |
| α chain w/WT signal | MKSLRVLLVILWLQLSWVWSQQKEVEQNSGPLSVPEGAIASLNCTYSDRGSQ | 1658 |
| peptide, Cα | SFFWYRQYSGKSPELIMFIYSNGDKEDGRFTAQLNKASQYVSLLIRDSQPSD | |
| (substituted) | SATYLCAAAMDSSYKLIFGSGTRLLVRPNIQNPEPAVYQLKDPRSQDSTLCL | |
| | FTDFDSQINVPKTMESGTFITDKCVLDMKAMDSKSNGAIAWSNQTSFTCQDI | |
| | FKETNATYPSSDVPCDATLTEKSFETDMNLNFQNLLVIVLRILLLKVAGFNL | |
| | LMTLRLWSS | |
| α chain w/alternative | MASLRVLLVILWLQLSWVWSQQKEVEQNSGPLSVPEGAIASLNCTYSDRGSQ | 1659 |
| signal peptide, Cα | SFFWYRQYSGKSPELIMFIYSNGDKEDGRFTAQLNKASQYVSLLIRDSQPSD | |
| (substituted) | SATYLCAAAMDSSYKLIFGSGTRLLVRPNIQNPEPAVYQLKDPRSQDSTLCL | |
| | FTDFDSQINVPKTMESGTFITDKCVLDMKAMDSKSNGAIAWSNQTSFTCQDI | |
| | FKETNATYPSSDVPCDATLTEKSFETDMNLNFQNLLVIVLRILLLKVAGFNL | |
| | LMTLRLWSS | |
| α chain w/alternative | MHSLRVLLVILWLQLSWVWSQQKEVEQNSGPLSVPEGAIASLNCTYSDRGSQ | 1660 |
| signal peptide, Cα | SFFWYRQYSGKSPELIMFIYSNGDKEDGRFTAQLNKASQYVSLLIRDSQPSD | |
| (substituted) | SATYLCAAAMDSSYKLIFGSGTRLLVRPNIQNPEPAVYQLKDPRSQDSTLCL | |
| | FTDFDSQINVPKTMESGTFITDKCVLDMKAMDSKSNGAIAWSNQTSFTCQDI | |
| | FKETNATYPSSDVPCDATLTEKSFETDMNLNFQNLLVIVLRILLLKVAGFNL | |
| | LMTLRLWSS | |
| CDR1ß | WSHSY | 2651 |
| CDR2ß | SAAADI | 2652 |
| CDR3ß | ASSDPGTEAF | 2653 |
| Vß w/o signal peptide | GITQSPRYKITETGRQVTLMCHQTWSHSYMFWYRQDLGHGLRLIYYSAAADI | 2654 |
| (SignalP) | TDKGEVPDGYVVSRSKTENFPLTLESATRSQTSVYFCASSDPGTEAFFGQGT | |
| | RLTVV | |
| Vß w/o signal peptide | DAGITQSPRYKITETGRQVTLMCHQTWSHSYMFWYRQDLGHGLRLIYYSAAA | 2655 |
| (IMGT) | DITDKGEVPDGYVVSRSKTENFPLTLESATRSQTSVYFCASSDPGTEAFFGQ | |
| | GTRLTVV | |
| Vß | MXTRLFFYVALCLLWAGHRDAGITQSPRYKITETGRQVTLMCHQTWSHSYMF | 2656 |
| | WYRQDLGHGLRLIYYSAAADITDKGEVPDGYVVSRSKTENFPLTLESATRSQ | 2657 |
| | TSVYFCASSDPGTEAFFGQGTRLTVV | |
| | (X = any amino acid) | |
| ß chain w/WT signal | MGTRLFFYVALCLLWAGHRDAGITQSPRYKITETGRQVTLMCHQTWSHSYMF | 2658 |
| peptide, Cß | WYRQDLGHGLRLIYYSAAADITDKGEVPDGYVVSRSKTENFPLTLESATRSQ | |
| (substituted) | TSVYFCASSDPGTEAFFGQGTRLTVVEDLRNVTPPKVSLFEPSKAEIANKQK | |
| | ATLVCLARGFFPDHVELSWWVNGKEVHSGVCTDPQAYKESNYSYCLSSRLRV | |
| | SATFWHNPRNHFRCQVQFHGLSEEDKWPEGSPKPVTQNISAEAWGRADCGIT | |
| | SASYQQGVLSATILYEILLGKATLYAVLVSTLVVMAMVKRKNS | |
| ß chain w/alternative | MATRLFFYVALCLLWAGHRDAGITQSPRYKITETGRQVTLMCHQTWSHSYMF | 2659 |
| signal peptide, Cß | WYRQDLGHGLRLIYYSAAADITDKGEVPDGYVVSRSKTENFPLTLESATRSQ | |
| (substituted) | TSVYFCASSDPGTEAFFGQGTRLTVVEDLRNVTPPKVSLFEPSKAEIANKQK | |
| | ATLVCLARGFFPDHVELSWWVNGKEVHSGVCTDPQAYKESNYSYCLSSRLRV | |
| | SATFWHNPRNHFRCQVQFHGLSEEDKWPEGSPKPVTQNISAEAWGRADCGIT | |
| | SASYQQGVLSATILYEILLGKATLYAVLVSTLVVMAMVKRKNS | |
| ß chain w/alternative | MHTRLFFYVALCLLWAGHRDAGITQSPRYKITETGRQVTLMCHQTWSHSYMF | 2660 |
| signal peptide, Cß | WYRQDLGHGLRLIYYSAAADITDKGEVPDGYVVSRSKTENFPLTLESATRSQ | |
| (substituted) | TSVYFCASSDPGTEAFFGQGTRLTVVEDLRNVTPPKVSLFEPSKAEIANKQK | |
| | ATLVCLARGFFPDHVELSWWVNGKEVHSGVCTDPQAYKESNYSYCLSSRLRV | |
| | SATFWHNPRNHFRCQVQFHGLSEEDKWPEGSPKPVTQNISAEAWGRADCGIT | |
| | SASYQQGVLSATILYEILLGKATLYAVLVSTLVVMAMVKRKNS | |

[0230] In some embodiments, TCR066 interacts with and/or is specific for KRAS. In some embodiments, the peptide is from a neoantigen of KRAS. In some embodiments, the neoantigen has the amino acid change G12D relative to the wild type KRAS sequence. In some embodiments, TCR066 interacts with the neoantigen in the context of HLA-C*08:02 as described in International Publication No. WO 2018/026691, incorporated herein by reference in its entirety.

TABLE 6BO
Amino acid sequences of TCR067.

| | | SEQ |
|---|---|---|
| Description | Sequence | ID NO: |
| CDR1α | TIYSNPF | 1661 |
| CDR2α | SFTDNKR | 1662 |
| CDR3α | ALRGNAGAKLT | 1663 |
| Vα w/o signal peptide | DGDSVTQTEGLVTLTEGLPVMLNCTYQTIYSNPFLFWYVQHLNESPRLLLKS | 1664 |
| (SignalP) | FTDNKRTEHQGFHATLHKSSSSFHLQKSSAQLSDSALYYCALRGNAGAKLTF | |
| | GGGTRLTVRPD | |
| Vα w/o signal peptide | GDSVTQTEGLVTLTEGLPVMLNCTYQTIYSNPFLFWYVQHLNESPRLLLKSF | 1665 |
| (IMGT) | TDNKRTEHQGFHATLHKSSSSFHLQKSSAQLSDSALYYCALRGNAGAKLTFG | |
| | GGTRLTVRPD | |
| Vα | MXPVTCSVLVLLLMLRRSNGDGDSVTQTEGLVTLTEGLPVMLNCTYQTIYSN | 1666 |
| | PFLFWYVQHLNESPRLLLKSFTDNKRTEHQGFHATLHKSSSSFHLQKSSAQL | 1667 |
| | SDSALYYCALRGNAGAKLTFGGGTRLTVRPD | |
| | (X = any amino acid) | |
| α chain w/WT signal | MRPVTCSVLVLLLMLRRSNGDGDSVTQTEGLVTLTEGLPVMLNCTYQTIYSN | 1668 |
| peptide, Cα | PFLFWYVQHLNESPRLLLKSFTDNKRTEHQGFHATLHKSSSSFHLQKSSAQL | |
| (substituted) | SDSALYYCALRGNAGAKLTFGGGTRLTVRPDIQNPEPAVYQLKDPRSQDSTL | |
| | CLFTDFDSQINVPKTMESGTFITDKTVLDMKAMDSKSNGAIAWSNQTSFTCQ | |
| | DIFKETNATYPSSDVPCDATLTEKSFETDMNLNFQNLSVMGLRILLLKVAGF | |
| | NLLMTLRLWSS | |
| α chain w/alternative | MAPVTCSVLVLLLMLRRSNGDGDSVTQTEGLVTLTEGLPVMLNCTYQTIYSN | 1669 |
| signal peptide, Cα | PFLFWYVQHLNESPRLLLKSFTDNKRTEHQGFHATLHKSSSSFHLQKSSAQL | |
| (substituted) | SDSALYYCALRGNAGAKLTFGGGTRLTVRPDIQNPEPAVYQLKDPRSQDSTL | |
| | CLFTDFDSQINVPKTMESGTFITDKTVLDMKAMDSKSNGAIAWSNQTSFTCQ | |
| | DIFKETNATYPSSDVPCDATLTEKSFETDMNLNFQNLSVMGLRILLLKVAGE | |
| | NLLMTLRLWSS | |
| α chain w/alternative | MHPVTCSVLVLLLMLRRSNGDGDSVTQTEGLVTLTEGLPVMLNCTYQTIYSN | 1670 |
| signal peptide, Cα | PFLFWYVQHLNESPRLLLKSFTDNKRTEHQGFHATLHKSSSSFHLQKSSAQL | |
| (substituted) | SDSALYYCALRGNAGAKLTFGGGTRLTVRPDIQNPEPAVYQLKDPRSQDSTL | |
| | CLFTDFDSQINVPKTMESGTFITDKTVLDMKAMDSKSNGAIAWSNQTSFTCQ | |
| | DIFKETNATYPSSDVPCDATLTEKSFETDMNLNFQNLSVMGLRILLLKVAGF | |
| | NLLMTLRLWSS | |
| CDR1ß | LGHDT | 2661 |
| CDR2ß | YNNKQL | 2662 |
| CDR3ß | ASSSRDWSAETLY | 2663 |
| Vß w/o signal peptide | AVFQTPNYHVTQVGNEVSFNCKQTLGHDTMYWYKQDSKKLLKIMFSYNNKQL | 2664 |
| (SignalP) | IVNETVPRRFSPQSSDKAHLNLRIKSVEPEDSAVYLCASSSRDWSAETLYFG | |
| | SGTRLTVL | |
| Vß w/o signal peptide | ETAVFQTPNYHVTQVGNEVSFNCKQTLGHDTMYWYKQDSKKLLKIMFSYNNK | 2665 |
| (IMGT) | QLIVNETVPRRESPQSSDKAHLNLRIKSVEPEDSAVYLCASSSRDWSAETLY | |
| | FGSGTRLTVL | |
| Vß | MXCRLLSCVAFCLLGIGPLETAVFQTPNYHVTQVGNEVSFNCKQTLGHDTMY | 2666 |
| | WYKQDSKKLLKIMFSYNNKQLIVNETVPRRFSPQSSDKAHLNLRIKSVEPED | 2667 |
| | SAVYLCASSSRDWSAETLYFGSGTRLTVL | |
| | (X = any amino acid) | |
| ß chain w/WT signal | MGCRLLSCVAFCLLGIGPLETAVFQTPNYHVTQVGNEVSFNCKQTLGHDTMY | 2668 |
| peptide, Cß | WYKQDSKKLLKIMFSYNNKQLIVNETVPRRESPQSSDKAHLNLRIKSVEPED | |
| (substituted) | SAVYLCASSSRDWSAETLYFGSGTRLTVLEDLRNVTPPKVSLFEPSKAEIAN | |
| | KQKATLVCLARGFFPDHVELSWWVNGKEVHSGVSTDPQAYKESNYSYCLSSR | |
| | LRVSATFWHNPRNHFRCQVQFHGLSEEDKWPEGSPKPVTQNISAEAWGRADC | |
| | GITSASYHQGVLSATILYEILLGKATLYAVLVSGLVLMAMVKKKNS | |
| ß chain w/alternative | MACRLLSCVAFCLLGIGPLETAVFQTPNYHVTQVGNEVSFNCKQTLGHDTMY | 2669 |
| signal peptide, Cß | WYKQDSKKLLKIMFSYNNKQLIVNETVPRRESPQSSDKAHLNLRIKSVEPED | |
| (substituted) | SAVYLCASSSRDWSAETLYFGSGTRLTVLEDLRNVTPPKVSLFEPSKAEIAN | |
| | KQKATLVCLARGFFPDHVELSWWVNGKEVHSGVSTDPQAYKESNYSYCLSSR | |
| | LRVSATFWHNPRNHFRCQVQFHGLSEEDKWPEGSPKPVTQNISAEAWGRADC | |
| | GITSASYHQGVLSATILYEILLGKATLYAVLVSGLVLMAMVKKKNS | |
| ß chain w/alternative | MHCRLLSCVAFCLLGIGPLETAVFQTPNYHVTQVGNEVSFNCKQTLGHDTMY | 2670 |
| signal peptide, Cß | WYKQDSKKLLKIMESYNNKQLIVNETVPRRFSPQSSDKAHLNLRIKSVEPED | |
| (substituted) | SAVYLCASSSRDWSAETLYFGSGTRLTVLEDLRNVTPPKVSLFEPSKAEIAN | |
| | KQKATLVCLARGFFPDHVELSWWVNGKEVHSGVSTDPQAYKESNYSYCLSSR | |
| | LRVSATFWHNPRNHFRCQVQFHGLSEEDKWPEGSPKPVTQNISAEAWGRADC | |
| | GITSASYHQGVLSATILYEILLGKATLYAVLVSGLVLMAMVKKKNS | |

[0231] In some embodiments, TCR067 interacts with and/or is specific for KRAS. In some embodiments, the peptide is from a neoantigen of KRAS. In some embodiments, the neoantigen has the amino acid changes G12D and/or G12V relative to the wild type KRAS sequence. In some embodiments, TCR067 interacts with the neoantigen in the context of HLA-A11, as described in International Publication No. WO 2016/085904, incorporated herein by reference in its entirety.

TABLE 6BP
Amino acid sequences of TCR068.

| | | SEQ |
|---|---|---|
| Description | Sequence | ID NO: |
| CDR1α | DPNSYY | 1671 |
| CDR2α | VFSSTEI | 1672 |
| CDR3α | AVSGGTNSAGNKLT | 1673 |
| Vα w/o signal peptide | EQVEQRPPHLSVREGDSAVITCTYTDPNSYYFFWYKQEPGASLQLLMKVESS | 1674 |
| (SignalP) | TEINEGQGFTVLLNKKDKRLSLNLTAAHPGDSAAYFCAVSGGTNSAGNKLTF | |
| | GIGTRVLVRP | |
| Vα w/o signal peptide | GEQVEQRPPHLSVREGDSAVITCTYTDPNSYYFFWYKQEPGASLQLLMKVFS | 1675 |
| (IMGT) | STEINEGQGFTVLLNKKDKRLSLNLTAAHPGDSAAYFCAVSGGTNSAGNKLT | |
| | FGIGTRVLVRP | |
| Vα | MXTVTGPLFLCFWLQLNCVSRGEQVEQRPPHLSVREGDSAVITCTYTDPNSY | 1676 |
| | YFFWYKQEPGASLQLLMKVFSSTEINEGQGFTVLLNKKDKRLSLNLTAAHPG | 1677 |
| | DSAAYFCAVSGGTNSAGNKLTFGIGTRVLVRP | |
| | (X = any amino acid) | |
| α chain w/WT signal | MKTVTGPLFLCFWLQLNCVSRGEQVEQRPPHLSVREGDSAVITCTYTDPNSY | 1678 |
| peptide, Cα | YFFWYKQEPGASLQLLMKVFSSTEINEGQGFTVLLNKKDKRLSLNLTAAHPG | |
| (substituted) | DSAAYFCAVSGGTNSAGNKLTFGIGTRVLVRPDIQNPEPAVYQLKDPRSQDS | |
| | TLCLFTDFDSQINVPKTMESGTFITDKTVLDMKAMDSKSNGAIAWSNQTSFT | |
| | CQDIFKETNATYPSSDVPCDATLTEKSFETDMNLNFQNLSVMGLRILLLKVA | |
| | GFNLLMTLRLWSS | |
| α chain w/alternative | MATVTGPLFLCFWLQLNCVSRGEQVEQRPPHLSVREGDSAVITCTYTDPNSY | 1679 |
| signal peptide, Cα | YFFWYKQEPGASLQLLMKVFSSTEINEGQGFTVLLNKKDKRLSLNLTAAHPG | |
| (substituted) | DSAAYFCAVSGGTNSAGNKLTFGIGTRVLVRPDIQNPEPAVYQLKDPRSQDS | |
| | TLCLFTDFDSQINVPKTMESGTFITDKTVLDMKAMDSKSNGAIAWSNQTSFT | |
| | CQDIFKETNATYPSSDVPCDATLTEKSFETDMNLNFQNLSVMGLRILLLKVA | |
| | GFNLLMTLRLWSS | |
| α chain w/alternative | MHTVTGPLFLCFWLQLNCVSRGEQVEQRPPHLSVREGDSAVITCTYTDPNSY | 1680 |
| signal peptide, Cα | YFFWYKQEPGASLQLLMKVFSSTEINEGQGFTVLLNKKDKRLSLNLTAAHPG | |
| (substituted) | DSAAYFCAVSGGTNSAGNKLTFGIGTRVLVRPDIQNPEPAVYQLKDPRSQDS | |
| | TLCLFTDFDSQINVPKTMESGTFITDKTVLDMKAMDSKSNGAIAWSNQTSFT | |
| | CQDIFKETNATYPSSDVPCDATLTEKSFETDMNLNFQNLSVMGLRILLLKVA | |
| | GFNLLMTLRLWSS | |
| CDR1ß | LGHDT | 2671 |
| CDR2ß | YNNKQL | 2672 |
| CDR3ß | ASSRDWGPAEQF | 2673 |
| Vß w/o signal peptide | AVFQTPNYHVTQVGNEVSFNCKQTLGHDTMYWYKQDSKKLLKIMFSYNNKQL | 2674 |
| (SignalP) | IVNETVPRRFSPQSSDKAHLNLRIKSVEPEDSAVYLCASSRDWGPAEQFFGP | |
| | GTRLTVL | |
| Vß w/o signal peptide | ETAVFQTPNYHVTQVGNEVSFNCKQTLGHDTMYWYKQDSKKLLKIMFSYNNK | 2675 |
| (IMGT) | QLIVNETVPRRFSPQSSDKAHLNLRIKSVEPEDSAVYLCASSRDWGPAEQFF | |
| | GPGTRLTVL | |
| Vß | MXCRLLSCVAFCLLGIGPLETAVFQTPNYHVTQVGNEVSFNCKQTLGHDTMY | 2676 |
| | WYKQDSKKLLKIMFSYNNKQLIVNETVPRRFSPQSSDKAHLNLRIKSVEPED | 2677 |
| | SAVYLCASSRDWGPAEQFFGPGTRLTVL | |
| | (X = any amino acid) | |
| ß chain w/WT signal | MGCRLLSCVAFCLLGIGPLETAVFQTPNYHVTQVGNEVSFNCKQTLGHDTMY | 2678 |
| peptide, Cß | WYKQDSKKLLKIMFSYNNKQLIVNETVPRRFSPQSSDKAHLNLRIKSVEPED | |
| (substituted) | SAVYLCASSRDWGPAEQFFGPGTRLTVLEDLRNVTPPKVSLFEPSKAEIANK | |
| | QKATLVCLARGFFPDHVELSWWVNGKEVHSGVSTDPQAYKESNYSYCLSSRL | |
| | RVSATFWHNPRNHFRCQVQFHGLSEEDKWPEGSPKPVTQNISAEAWGRADCG | |
| | ITSASYHQGVLSATILYEILLGKATLYAVLVSGLVLMAMVKKKNS | |
| ß chain w/alternative | MACRLLSCVAFCLLGIGPLETAVFQTPNYHVTQVGNEVSFNCKQTLGHDTMY | 2679 |
| signal peptide, Cß | WYKQDSKKLLKIMFSYNNKQLIVNETVPRRFSPQSSDKAHLNLRIKSVEPED | |
| (substituted) | SAVYLCASSRDWGPAEQFFGPGTRLTVLEDLRNVTPPKVSLFEPSKAEIANK | |
| | QKATLVCLARGFFPDHVELSWWVNGKEVHSGVSTDPQAYKESNYSYCLSSRL | |
| | RVSATFWHNPRNHFRCQVQFHGLSEEDKWPEGSPKPVTQNISAEAWGRADCG | |
| | ITSASYHQGVLSATILYEILLGKATLYAVLVSGLVLMAMVKKKNS | |
| ß chain w/alternative | MHCRLLSCVAFCLLGIGPLETAVFQTPNYHVTQVGNEVSFNCKQTLGHDTMY | 2680 |
| signal peptide, Cß | WYKQDSKKLLKIMFSYNNKQLIVNETVPRRFSPQSSDKAHLNLRIKSVEPED | |
| (substituted) | SAVYLCASSRDWGPAEQFFGPGTRLTVLEDLRNVTPPKVSLFEPSKAEIANK | |
| | QKATLVCLARGFFPDHVELSWWVNGKEVHSGVSTDPQAYKESNYSYCLSSRL | |
| | RVSATFWHNPRNHFRCQVQFHGLSEEDKWPEGSPKPVTQNISAEAWGRADCG | |
| | ITSASYHQGVLSATILYEILLGKATLYAVLVSGLVLMAMVKKKNS | |

[0232] In some embodiments, TCR068 interacts with and/or is specific for KRAS. In some embodiments, the peptide is from a neoantigen of KRAS. In some embodiments, the neoantigen has the amino acid changes G12D and/or G12V relative to the wild type KRAS sequence. In some embodiments, TCR068 interacts with the neoantigen in the context of HLA-A11, as described in International Publication No. WO 2016/085904, incorporated herein by reference in its entirety.

TABLE 6BQ
Amino acid sequences of TCR069.

| | | SEQ |
|---|---|---|
| Description | Sequence | ID NO: |
| CDR1α | NDMFDY | 1681 |
| CDR2α | VRSNVDK | 1682 |
| CDR3α | AAGDSGGSNYKLT | 1683 |
| Vα w/o signal peptide | QQKTGGQQVKQSSPSLTVQEGGILILNCDYENDMFDYFAWYKKYPDNSPTLL | 1684 |
| (SignalP) | ISVRSNVDKREDGRFTVFLNKSGKHFSLHITASQPEDTAVYLCAAGDSGGSN | |
| | YKLTFGKGTLLTVTP | |
| Vα w/o signal peptide | QQKTGGQQVKQSSPSLTVQEGGILILNCDYENDMFDYFAWYKKYPDNSPTLL | 1685 |
| (IMGT) | ISVRSNVDKREDGRFTVFLNKSGKHFSLHITASQPEDTAVYLCAAGDSGGSN | |
| | YKLTFGKGTLLTVTP | |
| Vα | MXGFLKALLLVLCLRPEWIKSQQKTGGQQVKQSSPSLTVQEGGILILNCDYE | 1686 |
| | NDMFDYFAWYKKYPDNSPTLLISVRSNVDKREDGRFTVELNKSGKHFSLHIT | 1687 |
| | ASQPEDTAVYLCAAGDSGGSNYKLTFGKGTLLTVTP | |
| | (X = any amino acid) | |
| α chain w/WT signal | MTGFLKALLLVLCLRPEWIKSQQKTGGQQVKQSSPSLTVQEGGILILNCDYE | 1688 |
| peptide, Cα | NDMFDYFAWYKKYPDNSPTLLISVRSNVDKREDGRFTVFLNKSGKHFSLHIT | |
| (substituted) | ASQPEDTAVYLCAAGDSGGSNYKLTFGKGTLLTVTPNIQNPEPAVYQLKDPR | |
| | SQDSTLCLFTDFDSQINVPKTMESGTFITDKTVLDMKAMDSKSNGAIAWSNQ | |
| | TSFTCQDIFKETNATYPSSDVPCDATLTEKSFETDMNLNFQNLSVMGLRILL | |
| | LKVAGFNLLMTLRLWSS | |
| α chain w/alternative | MAGFLKALLLVLCLRPEWIKSQQKTGGQQVKQSSPSLTVQEGGILILNCDYE | 1689 |
| signal peptide, Cα | NDMFDYFAWYKKYPDNSPTLLISVRSNVDKREDGRFTVFLNKSGKHFSLHIT | |
| (substituted) | ASQPEDTAVYLCAAGDSGGSNYKLTFGKGTLLTVTPNIQNPEPAVYQLKDPR | |
| | SQDSTLCLFTDFDSQINVPKTMESGTFITDKTVLDMKAMDSKSNGAIAWSNQ | |
| | TSFTCQDIFKETNATYPSSDVPCDATLTEKSFETDMNLNFQNLSVMGLRILL | |
| | LKVAGFNLLMTLRLWSS | |
| α chain w/alternative | MHGFLKALLLVLCLRPEWIKSQQKTGGQQVKQSSPSLTVQEGGILILNCDYE | 1690 |
| signal peptide, Cα | NDMFDYFAWYKKYPDNSPTLLISVRSNVDKREDGRFTVFLNKSGKHFSLHIT | |
| (substituted) | ASQPEDTAVYLCAAGDSGGSNYKLTFGKGTLLTVTPNIQNPEPAVYQLKDPR | |
| | SQDSTLCLFTDFDSQINVPKTMESGTFITDKTVLDMKAMDSKSNGAIAWSNQ | |
| | TSFTCQDIFKETNATYPSSDVPCDATLTEKSFETDMNLNFQNLSVMGLRILL | |
| | LKVAGFNLLMTLRLWSS | |
| CDR1ß | NSHNY | 2681 |
| CDR2ß | SYGAGN | 2682 |
| CDR3ß | ASASWGGYAEQF | 2683 |
| Vß w/o signal peptide | AVTQSPRNKVTVTGGNVTLSCRQTNSHNYMYWYRQDTGHGLRLIHYSYGAGN | 2684 |
| (SignalP) | LQIGDVPDGYKATRTTQEDFFLLLELASPSQTSLYFCASASWGGYAEQFFGP | |
| | GTRLTVL | |
| Vß w/o signal peptide | EAAVTQSPRNKVTVTGGNVTLSCRQTNSHNYMYWYRQDTGHGLRLIHYSYGA | 2685 |
| (IMGT) | GNLQIGDVPDGYKATRTTQEDFFLLLELASPSQTSLYFCASASWGGYAEQFF | |
| | GPGTRLTVL | |
| Vß | MXSRLFLVLSLLCTKHMEAAVTQSPRNKVTVTGGNVTLSCRQTNSHNYMYWY | 2686 |
| | RQDTGHGLRLIHYSYGAGNLQIGDVPDGYKATRTTQEDFFLLLELASPSQTS | 2687 |
| | LYFCASASWGGYAEQFFGPGTRLTVL | |
| | (X = any amino acid) | |
| ß chain w/WT signal | MGSRLFLVLSLLCTKHMEAAVTQSPRNKVTVTGGNVTLSCRQTNSHNYMYWY | 2688 |
| peptide, Cß | RQDTGHGLRLIHYSYGAGNLQIGDVPDGYKATRTTQEDFFLLLELASPSQTS | |
| (substituted) | LYFCASASWGGYAEQFFGPGTRLTVLEDLRNVTPPKVSLFEPSKAEIANKQK | |
| | ATLVCLARGFFPDHVELSWWVNGKEVHSGVSTDPQAYKESNYSYCLSSRLRV | |
| | SATFWHNPRNHFRCQVQFHGLSEEDKWPEGSPKPVTQNISAEAWGRADCGIT | |
| | SASYHQGVLSATILYEILLGKATLYAVLVSGLVLMAMVKKKNS | |
| ß chain w/alternative | MASRLFLVLSLLCTKHMEAAVTQSPRNKVTVTGGNVTLSCRQTNSHNYMYWY | 2689 |
| signal peptide, Cß | RQDTGHGLRLIHYSYGAGNLQIGDVPDGYKATRTTQEDFFLLLELASPSQTS | |
| (substituted) | LYFCASASWGGYAEQFFGPGTRLTVLEDLRNVTPPKVSLFEPSKAEIANKQK | |
| | ATLVCLARGFFPDHVELSWWVNGKEVHSGVSTDPQAYKESNYSYCLSSRLRV | |
| | SATFWHNPRNHFRCQVQFHGLSEEDKWPEGSPKPVTQNISAEAWGRADCGIT | |
| | SASYHQGVLSATILYEILLGKATLYAVLVSGLVLMAMVKKKNS | |
| ß chain w/alternative | MHSRLFLVLSLLCTKHMEAAVTQSPRNKVTVTGGNVTLSCRQTNSHNYMYWY | 2690 |
| signal peptide, Cß | RQDTGHGLRLIHYSYGAGNLQIGDVPDGYKATRTTQEDFFLLLELASPSQTS | |
| (substituted) | LYFCASASWGGYAEQFFGPGTRLTVLEDLRNVTPPKVSLFEPSKAEIANKQK | |
| | ATLVCLARGFFPDHVELSWWVNGKEVHSGVSTDPQAYKESNYSYCLSSRLRV | |
| | SATFWHNPRNHFRCQVQFHGLSEEDKWPEGSPKPVTQNISAEAWGRADCGIT | |
| | SASYHQGVLSATILYEILLGKATLYAVLVSGLVLMAMVKKKNS | |

[0233] In some embodiments, TCR069 interacts with and/or is specific for KRAS. In some embodiments, the peptide is from a neoantigen of KRAS. In some embodiments, the neoantigen has the amino acid changes G12D and/or G12V relative to the wild type KRAS sequence. In some embodiments, TCR069 interacts with the neoantigen in the context of HLA-A11, as described in International Publication No. WO 2016/085904, incorporated herein by reference in its entirety.

TABLE 6BR
Amino acid sequences of TCR070.

| | | SEQ |
|---|---|---|
| Description | Sequence | ID NO: |
| CDR1α | TTMRS | 1691 |
| CDR2α | LASGT | 1692 |
| CDR3α | AADSSNTGYQNFY | 1693 |
| Vα w/o signal peptide | DQVEQSPSALSLHEGTDSALRCNFTTTMRSVQWFRQNSRGSLISLFYLASGT | 1694 |
| (SignalP) | KENGRLKSAFDSKERRYSTLHIRDAQLEDSGTYFCAADSSNTGYQNFYFGKG | |
| | TSLTVIP | |
| Vα w/o signal peptide | GDQVEQSPSALSLHEGTDSALRCNFTTTMRSVQWFRQNSRGSLISLFYLASG | 1695 |
| (IMGT) | TKENGRLKSAFDSKERRYSTLHIRDAQLEDSGTYFCAADSSNTGYQNFYFGK | |
| | GTSLTVIP | |
| Vα | MXRNLGAVLGILWVQICWVRGDQVEQSPSALSLHEGTDSALRCNFTTTMRSV | 1696 |
| | QWFRQNSRGSLISLFYLASGTKENGRLKSAFDSKERRYSTLHIRDAQLEDSG | 1697 |
| | TYFCAADSSNTGYQNFYFGKGTSLTVIP | |
| | (X = any amino acid) | |
| α chain w/WT signal | MQRNLGAVLGILWVQICWVRGDQVEQSPSALSLHEGTDSALRCNFTTTMRSV | 1698 |
| peptide, Cα | QWFRQNSRGSLISLFYLASGTKENGRLKSAFDSKERRYSTLHIRDAQLEDSG | |
| (substituted) | TYFCAADSSNTGYQNFYFGKGTSLTVIPNIQNPEPAVYQLKDPRSQDSTLCL | |
| | FTDFDSQINVPKTMESGTFITDKTVLDMKAMDSKSNGAIAWSNQTSFTCQDI | |
| | FKETNATYPSSDVPCDATLTEKSFETDMNLNFQNLSVMGLRILLLKVAGFNL | |
| | LMTLRLWSS | |
| α chain w/alternative | MARNLGAVLGILWVQICWVRGDQVEQSPSALSLHEGTDSALRCNFTTTMRSV | 1699 |
| signal peptide, Cα | QWFRQNSRGSLISLFYLASGTKENGRLKSAFDSKERRYSTLHIRDAQLEDSG | |
| (substituted) | TYFCAADSSNTGYQNFYFGKGTSLTVIPNIQNPEPAVYQLKDPRSQDSTLCL | |
| | FTDFDSQINVPKTMESGTFITDKTVLDMKAMDSKSNGAIAWSNQTSFTCQDI | |
| | FKETNATYPSSDVPCDATLTEKSFETDMNLNFQNLSVMGLRILLLKVAGFNL | |
| | LMTLRLWSS | |
| α chain w/alternative | MHRNLGAVLGILWVQICWVRGDQVEQSPSALSLHEGTDSALRCNFTTTMRSV | 1700 |
| signal peptide, Cα | QWFRQNSRGSLISLFYLASGTKENGRLKSAFDSKERRYSTLHIRDAQLEDSG | |
| (substituted) | TYFCAADSSNTGYQNFYFGKGTSLTVIPNIQNPEPAVYQLKDPRSQDSTLCL | |
| | FTDFDSQINVPKTMESGTFITDKTVLDMKAMDSKSNGAIAWSNQTSFTCQDI | |
| | FKETNATYPSSDVPCDATLTEKSFETDMNLNFQNLSVMGLRILLLKVAGFNL | |
| | LMTLRLWSS | |
| CDR1ß | SGHLS | 2691 |
| CDR2ß | HYDKME | 2692 |
| CDR3ß | ASSLTDPLDSDYT | 2693 |
| Vß w/o signal peptide | NSGVVQSPRYIIKGKGERSILKCIPISGHLSVAWYQQTQGQELKFFIQHYDK | 2694 |
| (SignalP) | MERDKGNLPSRFSVQQFDDYHSEMNMSALELEDSAVYFCASSLTDPLDSDYT | |
| | FGSGTRLLVI | |
| Vß w/o signal peptide | SGVVQSPRYIIKGKGERSILKCIPISGHLSVAWYQQTQGQELKFFIQHYDKM | 2695 |
| (IMGT) | ERDKGNLPSRFSVQQFDDYHSEMNMSALELEDSAVYFCASSLTDPLDSDYTF | |
| | GSGTRLLVI | |
| Vß | MXNTAFPDPAWNTTLLSWVALFLLGTSSANSGVVQSPRYIIKGKGERSILKC | 2696 |
| | IPISGHLSVAWYQQTQGQELKFFIQHYDKMERDKGNLPSRFSVQQFDDYHSE | 2697 |
| | MNMSALELEDSAVYFCASSLTDPLDSDYTFGSGTRLLVI | |
| | (X = any amino acid) | |
| ß chain w/WT signal | MSNTAFPDPAWNTTLLSWVALFLLGTSSANSGVVQSPRYIIKGKGERSILKC | 2698 |
| peptide, Cß | IPISGHLSVAWYQQTQGQELKFFIQHYDKMERDKGNLPSRFSVQQFDDYHSE | |
| (substituted) | MNMSALELEDSAVYFCASSLTDPLDSDYTFGSGTRLLVIEDLRNVTPPKVSL | |
| | FEPSKAEIANKQKATLVCLARGFFPDHVELSWWVNGKEVHSGVSTDPQAYKE | |
| | SNYSYCLSSRLRVSATFWHNPRNHFRCQVQFHGLSEEDKWPEGSPKPVTQNI | |
| | SAEAWGRADCGITSASYQQGVLSATILYEILLGKATLYAVLVSTLVVMAMVK | |
| | RKNS | |
| ß chain w/alternative | MANTAFPDPAWNTTLLSWVALFLLGTSSANSGVVQSPRYIIKGKGERSILKC | 2699 |
| signal peptide, Cß | IPISGHLSVAWYQQTQGQELKFFIQHYDKMERDKGNLPSRFSVQQEDDYHSE | |
| (substituted) | MNMSALELEDSAVYFCASSLTDPLDSDYTFGSGTRLLVIEDLRNVTPPKVSL | |
| | FEPSKAEIANKQKATLVCLARGFFPDHVELSWWVNGKEVHSGVSTDPQAYKE | |
| | SNYSYCLSSRLRVSATFWHNPRNHFRCQVQFHGLSEEDKWPEGSPKPVTQNI | |
| | SAEAWGRADCGITSASYQQGVLSATILYEILLGKATLYAVLVSTLVVMAMVK | |
| | RKNS | |
| ß chain w/alternative | MHNTAFPDPAWNTTLLSWVALFLLGTSSANSGVVQSPRYIIKGKGERSILKC | 2700 |
| signal peptide, Cß | IPISGHLSVAWYQQTQGQELKFFIQHYDKMERDKGNLPSRFSVQQFDDYHSE | |
| (substituted) | MNMSALELEDSAVYFCASSLTDPLDSDYTFGSGTRLLVIEDLRNVTPPKVSL | |
| | FEPSKAEIANKQKATLVCLARGFFPDHVELSWWVNGKEVHSGVSTDPQAYKE | |
| | SNYSYCLSSRLRVSATFWHNPRNHFRCQVQFHGLSEEDKWPEGSPKPVTQNI | |
| | SAEAWGRADCGITSASYQQGVLSATILYEILLGKATLYAVLVSTLVVMAMVK | |
| | RKNS | |

[0234] In some embodiments, TCR070 interacts with and/or is specific for KRAS. In some embodiments, the peptide is from a neoantigen of KRAS. In some embodiments, the neoantigen has the amino acid changes G12D and/or G12V relative to the wild type KRAS sequence. In some embodiments, TCR070 interacts with the neoantigen in the context of HLA-A11, as described in International Publication No. WO 2016/085904, incorporated herein by reference in its entirety.

TABLE 6BS
Amino acid sequences of TCR071.

| | | SEQ |
|---|---|---|
| Description | Sequence | ID NO: |
| CDR1α | TTMRS | 1701 |
| CDR2α | LASGT | 1702 |
| CDR3α | AADSSNTZYQNFY | 1703 |
| | (Z = alanine, arginine, asparagine, aspartic acid, cysteine, | |
| | glutamic acid, glutamine, histidine, isoleucine, leucine, | |
| | lysine, methionine, phenylalanine, proline, serine, threonine, | |
| | tryptophan, tyrosine, or valine) | |
| Vα w/o signal peptide | DQVEQSPSALSLHEGTDSALRCNFTTTMRSVQWFRQNSRGSLISLFYLASGT | 1704 |
| (SignalP) | KENGRLKSAFDSKERRYSTLHIRDAQLEDSGTYFCAADSSNTZYQNFYFGKG | |
| | TSLTVIP | |
| | (Z = alanine, arginine, asparagine, aspartic acid, cysteine, | |
| | glutamic acid, glutamine, histidine, isoleucine, leucine, | |
| | lysine, methionine, phenylalanine, proline, serine, threonine, | |
| | tryptophan, tyrosine, or valine) | |
| Vα w/o signal peptide | GDQVEQSPSALSLHEGTDSALRCNFTTTMRSVQWFRQNSRGSLISLFYLASG | 1705 |
| (IMGT) | TKENGRLKSAFDSKERRYSTLHIRDAQLEDSGTYFCAADSSNTZYQNFYFGK | |
| | GTSLTVIP | |
| | (Z = alanine, arginine, asparagine, aspartic acid, cysteine, | |
| | glutamic acid, glutamine, histidine, isoleucine, leucine, | |
| | lysine, methionine, phenylalanine, proline, serine, threonine, | |
| | tryptophan, tyrosine, or valine) | |
| Vα | MXRNLGAVLGILWVQICWVRGDQVEQSPSALSLHEGTDSALRCNFTTTMRSV | 1706 |
| | QWFRQNSRGSLISLFYLASGTKENGRLKSAFDSKERRYSTLHIRDAQLEDSG | |
| | TYFCAADSSNTZYQNFYFGKGTSLTVIP | |
| | (X = any amino acid) | |
| | (Z = alanine, arginine, asparagine, aspartic acid, cysteine, | 1707 |
| | glutamic acid, glutamine, histidine, isoleucine, leucine, | |
| | lysine, methionine, phenylalanine, proline, serine, threonine, | |
| | tryptophan, tyrosine, or valine) | |
| α chain w/WT signal | MQRNLGAVLGILWVQICWVRGDQVEQSPSALSLHEGTDSALRCNFTTTMRSV | 1708 |
| peptide, Cα | QWFRQNSRGSLISLFYLASGTKENGRLKSAFDSKERRYSTLHIRDAQLEDSG | |
| (substituted) | TYFCAADSSNTZYQNFYFGKGTSLTVIPNIQNPEPAVYQLKDPRSQDSTLCL | |
| | FTDFDSQINVPKTMESGTFITDKTVLDMKAMDSKSNGAIAWSNQTSFTCQDI | |
| | FKETNATYPSSDVPCDATLTEKSFETDMNLNFQNLSVMGLRILLLKVAGFNL | |
| | LMTLRLWSS | |
| | (Z = alanine, arginine, asparagine, aspartic acid, cysteine, | |
| | glutamic acid, glutamine, histidine, isoleucine, leucine, | |
| | lysine, methionine, phenylalanine, proline, serine, threonine, | |
| | tryptophan, tyrosine, or valine) | |
| α chain w/alternative | MARNLGAVLGILWVQICWVRGDQVEQSPSALSLHEGTDSALRCNFTTTMRSV | 1709 |
| signal peptide, Cα | QWFRQNSRGSLISLFYLASGTKENGRLKSAFDSKERRYSTLHIRDAQLEDSG | |
| (substituted) | TYFCAADSSNTZYQNFYFGKGTSLTVIPNIQNPEPAVYQLKDPRSQDSTLCL | |
| | FTDFDSQINVPKTMESGTFITDKTVLDMKAMDSKSNGAIAWSNQTSFTCQDI | |
| | FKETNATYPSSDVPCDATLTEKSFETDMNLNFQNLSVMGLRILLLKVAGFNL | |
| | LMTLRLWSS | |
| | (Z = alanine, arginine, asparagine, aspartic acid, cysteine, | |
| | glutamic acid, glutamine, histidine, isoleucine, leucine, | |
| | lysine, methionine, phenylalanine, proline, serine, threonine, | |
| | tryptophan, tyrosine, or valine) | |
| α chain w/alternative | MHRNLGAVLGILWVQICWVRGDQVEQSPSALSLHEGTDSALRCNFTTTMRSV | 1710 |
| signal peptide, Cα | QWFRQNSRGSLISLFYLASGTKENGRLKSAFDSKERRYSTLHIRDAQLEDSG | |
| (substituted) | TYFCAADSSNTZYQNFYFGKGTSLTVIPNIQNPEPAVYQLKDPRSQDSTLCL | |
| | FTDFDSQINVPKTMESGTFITDKTVLDMKAMDSKSNGAIAWSNQTSFTCQDI | |
| | FKETNATYPSSDVPCDATLTEKSFETDMNLNFQNLSVMGLRILLLKVAGFNL | |
| | LMTLRLWSS | |
| | (Z = alanine, arginine, asparagine, aspartic acid, cysteine, | |
| | glutamic acid, glutamine, histidine, isoleucine, leucine, | |
| | lysine, methionine, phenylalanine, proline, serine, threonine, | |
| | tryptophan, tyrosine, or valine) | |
| CDR1ß | SGHLS | 2701 |
| CDR2B | HYDKME | 2702 |
| CDR3ß | CASSLTDPLDSDYTF | 2703 |
| Vß w/o signal peptide | NSGVVQSPRYIIKGKGERSILKCIPISGHLSVAWYQQTQGQELKFFIQHYDK | 2704 |
| (SignalP) | MERDKGNLPSRFSVQQFDDYHSEMNMSALELEDSAVYFCASSLTDPLDSDYT | |
| | FGSGTRLLVI | |
| Vß w/o signal peptide | SGVVQSPRYIIKGKGERSILKCIPISGHLSVAWYQQTQGQELKFFIQHYDKM | 2705 |
| (IMGT) | ERDKGNLPSRFSVQQFDDYHSEMNMSALELEDSAVYFCASSLTDPLDSDYTF | |
| | GSGTRLLVI | |
| Vß | MXNTAFPDPAWNTTLLSWVALFLLGTSSANSGVVQSPRYIIKGKGERSILKC | 2706 |
| | IPISGHLSVAWYQQTQGQELKFFIQHYDKMERDKGNLPSRFSVQQFDDYHSE | 2707 |
| | MNMSALELEDSAVYFCASSLTDPLDSDYTFGSGTRLLVI | |
| | (X = any amino acid) | |
| ß chain w/WT signal | MSNTAFPDPAWNTTLLSWVALFLLGTSSANSGVVQSPRYIIKGKGERSILKC | 2708 |
| peptide, Cß | IPISGHLSVAWYQQTQGQELKFFIQHYDKMERDKGNLPSRFSVQQFDDYHSE | |
| (substituted) | MNMSALELEDSAVYFCASSLTDPLDSDYTFGSGTRLLVIEDLRNVTPPKVSL | |
| | FEPSKAEIANKQKATLVCLARGFFPDHVELSWWVNGKEVHSGVSTDPQAYKE | |
| | SNYSYCLSSRLRVSATFWHNPRNHFRCQVQFHGLSEEDKWPEGSPKPVTQNI | |
| | SAEAWGRADCGITSASYQQGVLSATILYEILLGKATLYAVLVSTLVVMAMVK | |
| | RKNS | |
| ß chain w/alternative | MANTAFPDPAWNTTLLSWVALFLLGTSSANSGVVQSPRYIIKGKGERSILKC | 2709 |
| signal peptide, Cß | IPISGHLSVAWYQQTQGQELKFFIQHYDKMERDKGNLPSRFSVQQFDDYHSE | 2710 |
| (substituted) | MNMSALELEDSAVYFCASSLTDPLDSDYTFGSGTRLLVIEDLRNVTPPKVSL | |
| | FEPSKAEIANKQKATLVCLARGFFPDHVELSWWVNGKEVHSGVSTDPQAYKE | |
| | SNYSYCLSSRLRVSATFWHNPRNHFRCQVQFHGLSEEDKWPEGSPKPVTQNI | |
| | SAEAWGRADCGITSASYQQGVLSATILYEILLGKATLYAVLVSTLVVMAMVK | |
| | RKNS | |

[0235] In some embodiments, TCR071 interacts with and/or is specific for KRAS. In some embodiments, the peptide is from a neoantigen of KRAS. In some embodiments, the neoantigen has the amino acid changes G12D and/or G12V relative to the wild type KRAS sequence. In some embodiments, TCR071 interacts with the neoantigen in the context of HLA-A11, as described in International Publication No. WO 2016/085904, incorporated herein by reference in its entirety.

TABLE 6BT
Amino acid sequences of TCR072.

| | | SEQ |
|---|---|---|
| Description | Sequence | ID NO: |
| CDR1α | DRGSQS | 1711 |
| CDR2α | IYSNGD | 1712 |
| CDR3α | AVEGAGSYQLT | 1713 |
| Vα w/o signal peptide | QQKEVEQNSGPLSVPEGAIASLNCTYSDRGSQSFFWYRQYSGKSPELIMFIY | 1714 |
| (SignalP) | SNGDKEDGRFTAQLNKASQYVSLLIRDSQPSDSATYLCAVEGAGSYQLTFGK | |
| | GTKLSVIP | |
| Vα w/o signal peptide | QKEVEQNSGPLSVPEGAIASLNCTYSDRGSQSFFWYRQYSGKSPELIMFIYS | 1715 |
| (IMGT) | NGDKEDGRFTAQLNKASQYVSLLIRDSQPSDSATYLCAVEGAGSYQLTFGKG | |
| | TKLSVIP | |
| Vα | MXSLRVLLVILWLQLSWVWSQQKEVEQNSGPLSVPEGAIASLNCTYSDRGSQ | 1716 |
| | SFFWYRQYSGKSPELIMFIYSNGDKEDGRFTAQLNKASQYVSLLIRDSQPSD | |
| | SATYLCAVEGAGSYQLTFGKGTKLSVIP | 1717 |
| | (X = any amino acid) | |
| α chain w/WT signal | MKSLRVLLVILWLQLSWVWSQQKEVEQNSGPLSVPEGAIASLNCTYSDRGSQ | 1718 |
| peptide, Cα | SFFWYRQYSGKSPELIMFIYSNGDKEDGRFTAQLNKASQYVSLLIRDSQPSD | |
| (substituted) | SATYLCAVEGAGSYQLTFGKGTKLSVIPNIQNPEPAVYQLKDPRSQDSTLCL | |
| | FTDFDSQINVPKTMESGTFITDKCVLDMKAMDSKSNGAIAWSNQTSFTCQDI | |
| | FKETNATYPSSDVPCDATLTEKSFETDMNLNFQNLLVIVLRILLLKVAGFNL | |
| | LMTLRLWSS | |
| α chain w/alternative | MASLRVLLVILWLQLSWVWSQQKEVEQNSGPLSVPEGAIASLNCTYSDRGSQ | 1719 |
| signal peptide, Cα | SFFWYRQYSGKSPELIMFIYSNGDKEDGRFTAQLNKASQYVSLLIRDSQPSD | |
| (substituted) | SATYLCAVEGAGSYQLTFGKGTKLSVIPNIQNPEPAVYQLKDPRSQDSTLCL | |
| | FTDFDSQINVPKTMESGTFITDKCVLDMKAMDSKSNGAIAWSNQTSFTCQDI | |
| | FKETNATYPSSDVPCDATLTEKSFETDMNLNFQNLLVIVLRILLLKVAGFNL | |
| | LMTLRLWSS | |
| α chain w/alternative | MHSLRVLLVILWLQLSWVWSQQKEVEQNSGPLSVPEGAIASLNCTYSDRGSQ | 1720 |
| signal peptide, Cα | SFFWYRQYSGKSPELIMFIYSNGDKEDGRFTAQLNKASQYVSLLIRDSQPSD | |
| (substituted) | SATYLCAVEGAGSYQLTFGKGTKLSVIPNIQNPEPAVYQLKDPRSQDSTLCL | |
| | FTDFDSQINVPKTMESGTFITDKCVLDMKAMDSKSNGAIAWSNQTSFTCQDI | |
| | FKETNATYPSSDVPCDATLTEKSFETDMNLNFQNLLVIVLRILLLKVAGFNL | |
| | LMTLRLWSS | |
| CDR1ß | DFQATT | 2711 |
| CDR2ß | SNEGSKA | 2712 |
| CDR3ß | SASNRLAVNEQF | 2713 |
| Vß w/o signal peptide | GSGLGAVVSQHPSWVICKSGTSVKIECRSLDFQATTMFWYRQFPKQSLMLMA | 2714 |
| (SignalP) | TSNEGSKATYEQGVEKDKFLINHASLTLSTLTVTSAHPEDSSFYICSASNRL | |
| | AVNEQFFGPGTRLTVL | |
| Vß w/o signal peptide | GAVVSQHPSWVICKSGTSVKIECRSLDFQATTMFWYRQFPKQSLMLMATSNE | 2715 |
| (IMGT) | GSKATYEQGVEKDKFLINHASLTLSTLTVTSAHPEDSSFYICSASNRLAVNE | |
| | QFFGPGTRLTVL | |
| Vß | MXLLLLLLGPGISLLLPGSLAGSGLGAVVSQHPSWVICKSGTSVKIECRSLD | 2716 |
| | FQATTMFWYRQFPKQSLMLMATSNEGSKATYEQGVEKDKFLINHASLTLSTL | |
| | TVTSAHPEDSSFYICSASNRLAVNEQFFGPGTRLTVL | 2717 |
| | (X = any amino acid) | |
| ß chain w/WT signal | MLLLLLLLGPGISLLLPGSLAGSGLGAVVSQHPSWVICKSGTSVKIECRSLD | 2718 |
| peptide, Cß | FQATTMFWYRQFPKQSLMLMATSNEGSKATYEQGVEKDKFLINHASLTLSTL | |
| (substituted) | TVTSAHPEDSSFYICSASNRLAVNEQFFGPGTRLTVLEDLRNVTPPKVSLFE | |
| | PSKAEIANKQKATLVCLARGFFPDHVELSWWVNGKEVHSGVCTDPQAYKESN | |
| | YSYCLSSRLRVSATFWHNPRNHFRCQVQFHGLSEEDKWPEGSPKPVTQNISA | |
| | EAWGRADCGITSASYQQGVLSATILYEILLGKATLYAVLVSTLVVMAMVKRK | |
| | NS | |
| ß chain w/alternative | MALLLLLLGPGISLLLPGSLAGSGLGAVVSQHPSWVICKSGTSVKIECRSLD | 2719 |
| signal peptide, Cß | FQATTMFWYRQFPKQSLMLMATSNEGSKATYEQGVEKDKFLINHASLTLSTL | |
| (substituted) | TVTSAHPEDSSFYICSASNRLAVNEQFFGPGTRLTVLEDLRNVTPPKVSLFE | |
| | PSKAEIANKQKATLVCLARGFFPDHVELSWWVNGKEVHSGVCTDPQAYKESN | |
| | YSYCLSSRLRVSATFWHNPRNHFRCQVQFHGLSEEDKWPEGSPKPVTQNISA | |
| | EAWGRADCGITSASYQQGVLSATILYEILLGKATLYAVLVSTLVVMAMVKRK | |
| | NS | |
| ß chain w/alternative | MHLLLLLLGPGISLLLPGSLAGSGLGAVVSQHPSWVICKSGTSVKIECRSLD | 2720 |
| signal peptide, Cß | FQATTMFWYRQFPKQSLMLMATSNEGSKATYEQGVEKDKFLINHASLTLSTL | |
| (substituted) | TVTSAHPEDSSFYICSASNRLAVNEQFFGPGTRLTVLEDLRNVTPPKVSLFE | |
| | PSKAEIANKQKATLVCLARGFFPDHVELSWWVNGKEVHSGVCTDPQAYKESN | |
| | YSYCLSSRLRVSATFWHNPRNHFRCQVQFHGLSEEDKWPEGSPKPVTQNISA | |
| | EAWGRADCGITSASYQQGVLSATILYEILLGKATLYAVLVSTLVVMAMVKRK | |
| | NS | |

[0236] In some embodiments, TCR072 interacts with and/or is specific for KRAS. In some embodiments, the peptide is from a neoantigen of KRAS. In some embodiments, the neoantigen has the amino acid change G12R relative to the wild type KRAS sequence. In some embodiments, TCR072 interacts with the neoantigen in the context of HLA-DQA1*05:05:HLA-DQB1*03:01 heterodimer as described in International Publication No. WO 2020/154275, incorporated herein by reference in its entirety.

TABLE 6BU
Amino acid sequences of TCR073.

| | | SEQ |
|---|---|---|
| Description | Sequence | ID NO: |
| CDR1α | NSMFDY | 1721 |
| CDR2α | ISISSIKDK | 1722 |
| CDR3α | AASGNTGTASKLT | 1723 |
| Vα w/o signal peptide | QQKNDDQQVKQNSPSLSVQEGRISILNCDYTNSMFDYFLWYKKYPAEGPTFL | 1724 |
| (SignalP) | ISISSIKDKNEDGRFTVFLNKSAKHLSLHIVPSQPGDSAVYFCAASGNTGTA | |
| | SKLTFGTGTRLQVTL | |
| Vα w/o signal peptide | DQQVKQNSPSLSVQEGRISILNCDYTNSMFDYFLWYKKYPAEGPTFLISISS | 1725 |
| (IMGT) | IKDKNEDGRFTVFLNKSAKHLSLHIVPSQPGDSAVYFCAASGNTGTASKLTF | |
| | GTGTRLQVTL | |
| Vα | MXMLLGASVLILWLQPDWVNSQQKNDDQQVKQNSPSLSVQEGRISILNCDYT | 1726 |
| | NSMFDYFLWYKKYPAEGPTFLISISSIKDKNEDGRFTVFLNKSAKHLSLHIV | |
| | PSQPGDSAVYFCAASGNTGTASKLTFGTGTRLQVTL | 1727 |
| | (X = any amino acid) | |
| α chain w/WT signal | MAMLLGASVLILWLQPDWVNSQQKNDDQQVKQNSPSLSVQEGRISILNCDYT | 1728 |
| peptide, Cα | NSMFDYFLWYKKYPAEGPTFLISISSIKDKNEDGRFTVFLNKSAKHLSLHIV | |
| (substituted) | PSQPGDSAVYFCAASGNTGTASKLTFGTGTRLQVTLNIQNPEPAVYQLKDPR | |
| | SQDSTLCLFTDFDSQINVPKTMESGTFITDKCVLDMKAMDSKSNGAIAWSNQ | |
| | TSFTCQDIFKETNATYPSSDVPCDATLTEKSFETDMNLNFQNLLVIVLRILL | |
| | LKVAGFNLLMTLRLWSS | |
| α chain w/alternative | MHMLLGASVLILWLQPDWVNSQQKNDDQQVKQNSPSLSVQEGRISILNCDYT | 1729 |
| signal peptide, Cα | NSMFDYFLWYKKYPAEGPTFLISISSIKDKNEDGRFTVFLNKSAKHLSLHIV | 1730 |
| (substituted) | PSQPGDSAVYFCAASGNTGTASKLTFGTGTRLQVTLNIQNPEPAVYQLKDPR | |
| | SQDSTLCLFTDFDSQINVPKTMESGTFITDKCVLDMKAMDSKSNGAIAWSNQ | |
| | TSFTCQDIFKETNATYPSSDVPCDATLTEKSFETDMNLNFQNLLVIVLRILL | |
| | LKVAGFNLLMTLRLWSS | |
| CDR1ß | LNHDA | 2721 |
| CDR2ß | SQIVND | 2722 |
| CDR3ß | ASSNQLVTGGYGYT | 2723 |
| Vß w/o signal peptide | GITQSPKYLFRKEGQNVTLSCEQNLNHDAMYWYRQDPGQGLRLIYYSQIVND | 2724 |
| (SignalP) | FQKGDIAEGYSVSREKKESFPLTVTSAQKNPTAFYLCASSNQLVTGGYGYTE | |
| | GSGTRLTVV | |
| Vß w/o signal peptide | DGGITQSPKYLFRKEGQNVTLSCEQNLNHDAMYWYRQDPGQGLRLIYYSQIV | 2725 |
| (IMGT) | NDFQKGDIAEGYSVSREKKESFPLTVTSAQKNPTAFYLCASSNQLVTGGYGY | |
| | TFGSGTRLTVV | |
| Vß | MXNQVLCCVVLCFLGANTVDGGITQSPKYLFRKEGQNVTLSCEQNLNHDAMY | 2726 |
| | WYRQDPGQGLRLIYYSQIVNDFQKGDIAEGYSVSREKKESFPLTVTSAQKNP | 2727 |
| | TAFYLCASSNQLVTGGYGYTFGSGTRLTVV | |
| | (X = any amino acid) | |
| ß chain w/WT signal | MSNQVLCCVVLCFLGANTVDGGITQSPKYLFRKEGQNVTLSCEQNLNHDAMY | 2728 |
| peptide, Cß | WYRQDPGQGLRLIYYSQIVNDFQKGDIAEGYSVSREKKESFPLTVTSAQKNP | |
| (substituted) | TAFYLCASSNQLVTGGYGYTFGSGTRLTVVEDLRNVTPPKVSLFEPSKAEIA | |
| | NKQKATLVCLARGFFPDHVELSWWVNGKEVHSGVCTDPQAYKESNYSYCLSS | |
| | RLRVSATFWHNPRNHFRCQVQFHGLSEEDKWPEGSPKPVTQNISAEAWGRAD | |
| | CGITSASYQQGVLSATILYEILLGKATLYAVLVSTLVVMAMVKRKNS | |
| ß chain w/alternative | MANQVLCCVVLCFLGANTVDGGITQSPKYLFRKEGQNVTLSCEQNLNHDAMY | 2729 |
| signal peptide, Cß | WYRQDPGQGLRLIYYSQIVNDFQKGDIAEGYSVSREKKESFPLTVTSAQKNP | |
| (substituted) | TAFYLCASSNQLVTGGYGYTFGSGTRLTVVEDLRNVTPPKVSLFEPSKAEIA | |
| | NKQKATLVCLARGFFPDHVELSWWVNGKEVHSGVCTDPQAYKESNYSYCLSS | |
| | RLRVSATFWHNPRNHFRCQVQFHGLSEEDKWPEGSPKPVTQNISAEAWGRAD | |
| | CGITSASYQQGVLSATILYEILLGKATLYAVLVSTLVVMAMVKRKNS | |
| ß chain w/alternative | MHNQVLCCVVLCFLGANTVDGGITQSPKYLFRKEGQNVTLSCEQNINHDAMY | 2730 |
| signal peptide, Cß | WYRQDPGQGLRLIYYSQIVNDFQKGDIAEGYSVSREKKESFPLTVTSAQKNP | |
| (substituted) | TAFYLCASSNQLVTGGYGYTFGSGTRLTVVEDLRNVTPPKVSLFEPSKAEIA | |
| | NKQKATLVCLARGFFPDHVELSWWVNGKEVHSGVCTDPQAYKESNYSYCLSS | |
| | RLRVSATFWHNPRNHFRCQVQFHGLSEEDKWPEGSPKPVTQNISAEAWGRAD | |
| | CGITSASYQQGVLSATILYEILLGKATLYAVLVSTLVVMAMVKRKNS | |

[0237] In some embodiments, TCR073 interacts with and/or is specific for KRAS. In some embodiments, the peptide is from a neoantigen of KRAS. In some embodiments, the neoantigen has the amino acid change G12R relative to the wild type KRAS sequence. In some embodiments, TCR073 interacts with the neoantigen in the context of HLA-DRB5*01:HLA-DRA*01:01 heterodimer as described in International Publication No. WO 2020/154275, incorporated herein by reference in its entirety.

TABLE 6BV
Amino acid sequences of TCR074.

| | | SEQ |
|---|---|---|
| Description | Sequence | ID NO: |
| CDR1α | TIYSNAF | 1731 |
| CDR2α | SSTDNKR | 1732 |
| CDR3α | ALSEGGNYKYV | 1733 |
| Vα w/o signal peptide | DGDSVTQKEGLVTLTEGLPVMLNCTYQTIYSNAFLFWYVHYLNESPRLLLKS | 1734 |
| (SignalP) | STDNKRTEHQGFHATLHKSSSSFHLQKSSAQLSDSALYYCALSEGGNYKYVF | |
| | GAGTRLKVIA | |
| Vα w/o signal peptide | GDSVTQKEGLVTLTEGLPVMLNCTYQTIYSNAFLFWYVHYLNESPRLLLKSS | 1735 |
| (IMGT) | TDNKRTEHQGFHATLHKSSSSFHLQKSSAQLSDSALYYCALSEGGNYKYVFG | |
| | AGTRLKVIA | |
| Vα | MXPGTCSVLVLLLMLRRSNGDGDSVTQKEGLVTLTEGLPVMLNCTYQTIYSN | 1736 |
| | AFLFWYVHYLNESPRLLLKSSTDNKRTEHQGFHATLHKSSSSFHLQKSSAQL | 1737 |
| | SDSALYYCALSEGGNYKYVFGAGTRLKVIA | |
| | (X = any amino acid) | |
| α chain w/WT signal | MRPGTCSVLVLLLMLRRSNGDGDSVTQKEGLVTLTEGLPVMLNCTYQTIYSN | 1738 |
| peptide, Cα | AFLFWYVHYLNESPRLLLKSSTDNKRTEHQGFHATLHKSSSSFHLQKSSAQL | |
| (substituted) | SDSALYYCALSEGGNYKYVFGAGTRLKVIANIQNPEPAVYQLKDPRSQDSTL | |
| | CLFTDFDSQINVPKTMESGTFITDKCVLDMKAMDSKSNGAIAWSNQTSFTCQ | |
| | DIFKETNATYPSSDVPCDATLTEKSFETDMNLNFQNLLVIVLRILLLKVAGE | |
| | NLLMTLRLWSS | |
| α chain w/alternative | MAPGTCSVLVLLLMLRRSNGDGDSVTQKEGLVTLTEGLPVMLNCTYQTIYSN | 1739 |
| signal peptide, Cα | AFLFWYVHYLNESPRLLLKSSTDNKRTEHQGFHATLHKSSSSFHLQKSSAQL | |
| (substituted) | SDSALYYCALSEGGNYKYVFGAGTRLKVIANIQNPEPAVYQLKDPRSQDSTL | |
| | CLFTDFDSQINVPKTMESGTFITDKCVLDMKAMDSKSNGAIAWSNQTSFTCQ | |
| | DIFKETNATYPSSDVPCDATLTEKSFETDMNLNFQNLLVIVLRILLLKVAGF | |
| | NLLMTLRLWSS | |
| α chain w/alternative | MHPGTCSVLVLLLMLRRSNGDGDSVTQKEGLVTLTEGLPVMLNCTYQTIYSN | 1740 |
| signal peptide, Cα | AFLFWYVHYLNESPRLLLKSSTDNKRTEHQGFHATLHKSSSSFHLQKSSAQL | |
| (substituted) | SDSALYYCALSEGGNYKYVFGAGTRLKVIANIQNPEPAVYQLKDPRSQDSTL | |
| | CLFTDFDSQINVPKTMESGTFITDKCVLDMKAMDSKSNGAIAWSNQTSFTCQ | |
| | DIFKETNATYPSSDVPCDATLTEKSFETDMNLNFQNLLVIVLRILLLKVAGF | |
| | NLLMTLRLWSS | |
| CDR1ß | NSQYPW | 2731 |
| CDR2ß | LRSPGD | 2732 |
| CDR3ß | TCSARHSAETLY | 2733 |
| Vß w/o signal peptide | DPTVTLLEQNPRWRLVPRGQAVNLRCILKNSQYPWMSWYQQDLQKQLQWLFT | 2734 |
| (SignalP) | LRSPGDKEVKSLPGADYLATRVTDTELRLQVANMSQGRTLYCTCSARHSAET | |
| | LYFGSGTRLTVL | |
| Vß w/o signal peptide | VTLLEQNPRWRLVPRGQAVNLRCILKNSQYPWMSWYQQDLQKQLQWLFTLRS | 2735 |
| (IMGT) | PGDKEVKSLPGADYLATRVTDTELRLQVANMSQGRTLYCTCSARHSAETLYF | |
| | GSGTRLTVL | |
| Vß | MXQFCILCLCVLMASVATDPTVTLLEQNPRWRLVPRGQAVNLRCILKNSQYP | 2736 |
| | WMSWYQQDLQKQLQWLFTLRSPGDKEVKSLPGADYLATRVTDTELRLQVANM | 2737 |
| | SQGRTLYCTCSARHSAETLYFGSGTRLTVL | |
| | (X = any amino acid) | |
| ß chain w/WT signal | MWQFCILCLCVLMASVATDPTVTLLEQNPRWRLVPRGQAVNLRCILKNSQYP | 2738 |
| peptide, Cß | WMSWYQQDLQKQLQWLFTLRSPGDKEVKSLPGADYLATRVTDTELRLQVANM | |
| (substituted) | SQGRTLYCTCSARHSAETLYFGSGTRLTVLEDLRNVTPPKVSLFEPSKAEIA | |
| | NKQKATLVCLARGFFPDHVELSWWVNGKEVHSGVCTDPQAYKESNYSYCLSS | |
| | RLRVSATFWHNPRNHFRCQVQFHGLSEEDKWPEGSPKPVTQNISAEAWGRAD | |
| | CGITSASYQQGVLSATILYEILLGKATLYAVLVSTLVVMAMVKRKNS | |
| ß chain w/alternative | MAQFCILCLCVLMASVATDPTVTLLEQNPRWRLVPRGQAVNLRCILKNSQYP | 2739 |
| signal peptide, Cß | WMSWYQQDLQKQLQWLFTLRSPGDKEVKSLPGADYLATRVTDTELRLQVANM | |
| (substituted) | SQGRTLYCTCSARHSAETLYFGSGTRLTVLEDLRNVTPPKVSLFEPSKAEIA | |
| | NKQKATLVCLARGFFPDHVELSWWVNGKEVHSGVCTDPQAYKESNYSYCLSS | |
| | RLRVSATFWHNPRNHFRCQVQFHGLSEEDKWPEGSPKPVTQNISAEAWGRAD | |
| | CGITSASYQQGVLSATILYEILLGKATLYAVLVSTLVVMAMVKRKNS | |
| ß chain w/alternative | MHQFCILCLCVLMASVATDPTVTLLEQNPRWRLVPRGQAVNLRCILKNSQYP | 2740 |
| signal peptide, Cß | WMSWYQQDLQKQLQWLFTLRSPGDKEVKSLPGADYLATRVTDTELRLQVANM | |
| (substituted) | SQGRTLYCTCSARHSAETLYFGSGTRLTVLEDLRNVTPPKVSLFEPSKAEIA | |
| | NKQKATLVCLARGFFPDHVELSWWVNGKEVHSGVCTDPQAYKESNYSYCLSS | |
| | RLRVSATFWHNPRNHFRCQVQFHGLSEEDKWPEGSPKPVTQNISAEAWGRAD | |
| | CGITSASYQQGVLSATILYEILLGKATLYAVLVSTLVVMAMVKRKNS | |

[0238] In some embodiments, TCR074 interacts with and/or is specific for KRAS. In some embodiments, the peptide is from a neoantigen of KRAS. In some embodiments, the neoantigen has the amino acid change G12V relative to the wild type KRAS sequence. In some embodiments, TCR074 interacts with the neoantigen in the context of HLA-A3 heterodimer as described in International Publication No. WO 2020/086827, incorporated herein by reference in its entirety.

TABLE 6BW
Amino acid sequences of TCR075.

| | | SEQ |
|---|---|---|
| Description | Sequence | ID NO: |
| CDR1α | TSDPSYG | 1741 |
| CDR2α | QGSYDQQN | 1742 |
| CDR3α | AMRGASQGGSEKLV | 1743 |
| Vα w/o signal peptide | QKITQTQPGMFVQEKEAVTLDCTYDTSDPSYGLFWYKQPSSGEMIFLIYQGS | 1744 |
| (SignalP) | YDQQNATEGRYSLNFQKARKSANLVISASQLGDSAMYFCAMRGASQGGSEKL | |
| | VFGKGTKLTVNP | |
| Vα w/o signal peptide | AQKITQTQPGMFVQEKEAVTLDCTYDTSDPSYGLFWYKQPSSGEMIFLIYQG | 1745 |
| (IMGT) | SYDQQNATEGRYSLNFQKARKSANLVISASQLGDSAMYFCAMRGASQGGSEK | |
| | LVFGKGTKLTVNP | |
| Vα | MXLSSLLKVVTASLWLGPGIAQKITQTQPGMFVQEKEAVTLDCTYDTSDPSY | 1746 |
| | GLFWYKQPSSGEMIFLIYQGSYDQQNATEGRYSLNFQKARKSANLVISASQL | |
| | GDSAMYFCAMRGASQGGSEKLVFGKGTKLTVNP | 1747 |
| | (X = any amino acid) | |
| α chain w/WT signal | MSLSSLLKVVTASLWLGPGIAQKITQTQPGMFVQEKEAVTLDCTYDTSDPSY | 1748 |
| peptide, Cα | GLFWYKQPSSGEMIFLIYQGSYDQQNATEGRYSLNFQKARKSANLVISASQL | |
| (substituted) | GDSAMYFCAMRGASQGGSEKLVFGKGTKLTVNPNIQNPEPAVYQLKDPRSQD | |
| | STLCLFTDFDSQINVPKTMESGTFITDKCVLDMKAMDSKSNGAIAWSNQTSF | |
| | TCQDIFKETNATYPSSDVPCDATLTEKSFETDMNLNFQNLLVIVLRILLLKV | |
| | AGFNLLMTLRLWSS | |
| α chain w/alternative | MALSSLLKVVTASLWLGPGIAQKITQTQPGMFVQEKEAVTLDCTYDTSDPSY | 1749 |
| signal peptide, Cα | GLFWYKQPSSGEMIFLIYQGSYDQQNATEGRYSLNFQKARKSANLVISASQL | |
| (substituted) | GDSAMYFCAMRGASQGGSEKLVFGKGTKLTVNPNIQNPEPAVYQLKDPRSQD | |
| | STLCLFTDFDSQINVPKTMESGTFITDKCVLDMKAMDSKSNGAIAWSNQTSF | |
| | TCQDIFKETNATYPSSDVPCDATLTEKSFETDMNLNFQNLLVIVLRILLLKV | |
| | AGFNLLMTLRLWSS | |
| α chain w/alternative | MHLSSLLKVVTASLWLGPGIAQKITQTQPGMFVQEKEAVTLDCTYDTSDPSY | 1750 |
| signal peptide, Cα | GLFWYKQPSSGEMIFLIYQGSYDQQNATEGRYSLNFQKARKSANLVISASQL | |
| (substituted) | GDSAMYFCAMRGASQGGSEKLVFGKGTKLTVNPNIQNPEPAVYQLKDPRSQD | |
| | STLCLFTDFDSQINVPKTMESGTFITDKCVLDMKAMDSKSNGAIAWSNQTSF | |
| | TCQDIFKETNATYPSSDVPCDATLTEKSFETDMNLNFQNLLVIVLRILLLKV | |
| | AGFNLLMTLRLWSS | |
| CDR1ß | SGHRS | 2741 |
| CDR2ß | YFSETQ | 2742 |
| CDR3ß | ASSLTSGGFDEQF | 2743 |
| Vß w/o signal peptide | GVTQTPRYLIKTRGQQVTLSCSPISGHRSVSWYQQTPGQGLQFLFEYFSETQ | 2744 |
| (SignalP) | RNKGNFPGRFSGRQFSNSRSEMNVSTLELGDSALYLCASSLTSGGFDEQFFG | |
| | PGTRLTVL | |
| Vß w/o signal peptide | KAGVTQTPRYLIKTRGQQVTLSCSPISGHRSVSWYQQTPGQGLQFLFEYFSE | 2745 |
| (IMGT) | TQRNKGNFPGRFSGRQFSNSRSEMNVSTLELGDSALYLCASSLTSGGFDEQF | |
| | FGPGTRLTVL | |
| Vß | MXSRLLCWVLLCLLGAGPVKAGVTQTPRYLIKTRGQQVTLSCSPISGHRSVS | 2746 |
| | WYQQTPGQGLQFLFEYFSETQRNKGNFPGRESGRQFSNSRSEMNVSTLELGD | |
| | SALYLCASSLTSGGFDEQFFGPGTRLTVL | 2747 |
| | (X = any amino acid) | |
| ß chain w/WT signal | MGSRLLCWVLLCLLGAGPVKAGVTQTPRYLIKTRGQQVTLSCSPISGHRSVS | 2748 |
| peptide, Cß | WYQQTPGQGLQFLFEYFSETQRNKGNFPGRESGRQFSNSRSEMNVSTLELGD | |
| (substituted) | SALYLCASSLTSGGFDEQFFGPGTRLTVLEDLRNVTPPKVSLFEPSKAEIAN | |
| | KQKATLVCLARGFFPDHVELSWWVNGKEVHSGVCTDPQAYKESNYSYCLSSR | |
| | LRVSATFWHNPRNHFRCQVQFHGLSEEDKWPEGSPKPVTQNISAEAWGRADC | |
| | GITSASYQQGVLSATILYEILLGKATLYAVLVSTLVVMAMVKRKNS | |
| ß chain w/alternative | MASRLLCWVLLCLLGAGPVKAGVTQTPRYLIKTRGQQVTLSCSPISGHRSVS | 2749 |
| signal peptide, Cß | WYQQTPGQGLQFLFEYFSETQRNKGNFPGRFSGRQFSNSRSEMNVSTLELGD | |
| (substituted) | SALYLCASSLTSGGFDEQFFGPGTRLTVLEDLRNVTPPKVSLFEPSKAEIAN | |
| | KQKATLVCLARGFFPDHVELSWWVNGKEVHSGVCTDPQAYKESNYSYCLSSR | |
| | LRVSATFWHNPRNHFRCQVQFHGLSEEDKWPEGSPKPVTQNISAEAWGRADC | |
| | GITSASYQQGVLSATILYEILLGKATLYAVLVSTLVVMAMVKRKNS | |
| ß chain w/alternative | MHSRLLCWVLLCLLGAGPVKAGVTQTPRYLIKTRGQQVTLSCSPISGHRSVS | 2750 |
| signal peptide, Cß | WYQQTPGQGLQFLFEYFSETQRNKGNFPGRFSGRQFSNSRSEMNVSTLELGD | |
| (substituted) | SALYLCASSLTSGGFDEQFFGPGTRLTVLEDLRNVTPPKVSLFEPSKAEIAN | |
| | KQKATLVCLARGFFPDHVELSWWVNGKEVHSGVCTDPQAYKESNYSYCLSSR | |
| | LRVSATFWHNPRNHFRCQVQFHGLSEEDKWPEGSPKPVTQNISAEAWGRADC | |
| | GITSASYQQGVLSATILYEILLGKATLYAVLVSTLVVMAMVKRKNS | |

[0239] In some embodiments, TCR075 interacts with and/or is specific for KRAS. In some embodiments, the peptide is from a neoantigen of KRAS. In some embodiments, the neoantigen has the amino acid change G12V relative to the wild type KRAS sequence. In some embodiments, TCR075 interacts with the neoantigen in the context of HLA-A*11:01, as described in International Publication No. WO 2019/112941, incorporated herein b reference in its entirety.

TABLE 6BX
Amino acid sequences of TCR076.

| | | SEQ |
|---|---|---|
| Description | Sequence | ID NO: |
| CDR1α | DSASNY | 1751 |
| CDR2α | IRSNVGE | 1752 |
| CDR3α | AASTGGGNKLT | 1753 |
| Vα w/o signal peptide | ENVEQHPSTLSVQEGDSAVIKCTYSDSASNYFPWYKQELGKGPQLIIDIRSN | 1754 |
| (SignalP) | VGEKKDQRIAVTLNKTAKHFSLHITETQPEDSAVYFCAASTGGGNKLTFGTG | |
| | TQLKVEL | |
| Vα w/o signal peptide | GFNVEQHPSTLSVQEGDSAVIKCTYSDSASNYFPWYKQELGKGPQLIIDIRS | 1755 |
| (IMGT) | NVGEKKDQRIAVTLNKTAKHFSLHITETQPEDSAVYFCAASTGGGNKLTFGT | |
| | GTQLKVEL | |
| Vα | MXSIRAVFIFLWLQLDLVNGFNVEQHPSTLSVQEGDSAVIKCTYSDSASNYF | 1756 |
| | PWYKQELGKGPQLIIDIRSNVGEKKDQRIAVTLNKTAKHFSLHITETQPEDS | 1757 |
| | AVYFCAASTGGGNKLTFGTGTQLKVEL | |
| | (X = any amino acid) | |
| α chain w/WT signal | MTSIRAVFIFLWLQLDLVNGFNVEQHPSTLSVQEGDSAVIKCTYSDSASNYF | 1758 |
| peptide, Cα | PWYKQELGKGPQLIIDIRSNVGEKKDQRIAVTLNKTAKHFSLHITETQPEDS | |
| (substituted) | AVYFCAASTGGGNKLTFGTGTQLKVELNIQNPEPAVYQLKDPRSQDSTLCLF | |
| | TDFDSQINVPKTMESGTFITDKCVLDMKAMDSKSNGAIAWSNQTSFTCQDIF | |
| | KETNATYPSSDVPCDATLTEKSFETDMNLNFQNLLVIVLRILLLKVAGFNLL | |
| | MTLRLWSS | |
| α chain w/alternative | MASIRAVFIFLWLQLDLVNGFNVEQHPSTLSVQEGDSAVIKCTYSDSASNYF | 1759 |
| signal peptide, Cα | PWYKQELGKGPQLIIDIRSNVGEKKDQRIAVTLNKTAKHFSLHITETQPEDS | |
| (substituted) | AVYFCAASTGGGNKLTFGTGTQLKVELNIQNPEPAVYQLKDPRSQDSTLCLF | |
| | TDFDSQINVPKTMESGTFITDKCVLDMKAMDSKSNGAIAWSNQTSFTCQDIF | |
| | KETNATYPSSDVPCDATLTEKSFETDMNLNFQNLLVIVLRILLLKVAGFNLL | |
| | MTLRLWSS | |
| α chain w/alternative | MHSIRAVFIFLWLQLDLVNGFNVEQHPSTLSVQEGDSAVIKCTYSDSASNYF | 1760 |
| signal peptide, Cα | PWYKQELGKGPQLIIDIRSNVGEKKDQRIAVTLNKTAKHFSLHITETQPEDS | |
| (substituted) | AVYFCAASTGGGNKLTFGTGTQLKVELNIQNPEPAVYQLKDPRSQDSTLCLF | |
| | TDFDSQINVPKTMESGTFITDKCVLDMKAMDSKSNGAIAWSNQTSFTCQDIF | |
| | KETNATYPSSDVPCDATLTEKSFETDMNLNFQNLLVIVLRILLLKVAGFNLL | |
| | MTLRLWSS | |
| CDR1ß | DFQATT | 2751 |
| CDR2B | SNEGSKA | 2752 |
| CDR3ß | SAREGAGGMGTQY | 2753 |
| Vß w/o signal peptide | AVVSQHPSRVICKSGTSVKIECRSLDFQATTMFWYRQFPKQSLMLMATSNEG | 2754 |
| (SignalP) | SKATYEQGVEKDKFLINHASLTLSTLTVTSAHPEDSSFYICSAREGAGGMGT | |
| | QYFGPGTRLLVL | |
| Vß w/o signal peptide | GAVVSQHPSRVICKSGTSVKIECRSLDFQATTMFWYRQFPKQSLMLMATSNE | 2755 |
| (IMGT) | GSKATYEQGVEKDKFLINHASLTLSTLTVTSAHPEDSSFYICSAREGAGGMG | |
| | TQYFGPGTRLLVL | |
| Vß | MXLLLLLLGPAGSGLGAVVSQHPSRVICKSGTSVKIECRSLDFQATTMFWYR | 2756 |
| | QFPKQSLMLMATSNEGSKATYEQGVEKDKFLINHASLTLSTLTVTSAHPEDS | 2757 |
| | SFYICSAREGAGGMGTQYFGPGTRLLVL | |
| | (X = any amino acid) | |
| ß chain w/WT signal | MLLLLLLLGPAGSGLGAVVSQHPSRVICKSGTSVKIECRSLDFQATTMFWYR | 2758 |
| peptide, Cß | QFPKQSLMLMATSNEGSKATYEQGVEKDKFLINHASLTLSTLTVTSAHPEDS | |
| (substituted) | SFYICSAREGAGGMGTQYFGPGTRLLVLEDLRNVTPPKVSLFEPSKAEIANK | |
| | QKATLVCLARGFFPDHVELSWWVNGKEVHSGVCTDPQAYKESNYSYCLSSRL | |
| | RVSATFWHNPRNHFRCQVQFHGLSEEDKWPEGSPKPVTQNISAEAWGRADCG | |
| | ITSASYQQGVLSATILYEILLGKATLYAVLVSTLVVMAMVKRKNS | |
| ß chain w/alternative | MALLLLLLGPAGSGLGAVVSQHPSRVICKSGTSVKIECRSLDFQATTMFWYR | 2759 |
| signal peptide, Cß | QFPKQSLMLMATSNEGSKATYEQGVEKDKFLINHASLTLSTLTVTSAHPEDS | |
| (substituted) | SFYICSAREGAGGMGTQYFGPGTRLLVLEDLRNVTPPKVSLFEPSKAEIANK | |
| | QKATLVCLARGFFPDHVELSWWVNGKEVHSGVCTDPQAYKESNYSYCLSSRL | |
| | RVSATFWHNPRNHFRCQVQFHGLSEEDKWPEGSPKPVTQNISAEAWGRADCG | |
| | ITSASYQQGVLSATILYEILLGKATLYAVLVSTLVVMAMVKRKNS | |
| ß chain w/alternative | MHLLLLLLGPAGSGLGAVVSQHPSRVICKSGTSVKIECRSLDFQATTMFWYR | 2760 |
| signal peptide, Cß | QFPKQSLMLMATSNEGSKATYEQGVEKDKFLINHASLTLSTLTVTSAHPEDS | |
| (substituted) | SFYICSAREGAGGMGTQYFGPGTRLLVLEDLRNVTPPKVSLFEPSKAEIANK | |
| | QKATLVCLARGFFPDHVELSWWVNGKEVHSGVCTDPQAYKESNYSYCLSSRL | |
| | RVSATFWHNPRNHFRCQVQFHGLSEEDKWPEGSPKPVTQNISAEAWGRADCG | |
| | ITSASYQQGVLSATILYEILLGKATLYAVLVSTLVVMAMVKRKNS | |

[0240] In some embodiments, TCR076 interacts with and/or is specific for KRAS. In some embodiments, the peptide is from a neoantigen of KRAS. In some embodiments, the neoantigen has the amino acid change G12V relative to the wild type KRAS sequence. In some embodiments, TCR076 interacts with the neoantigen in the context of HLA-DRB1*07:01, as described in International Publication No. WO 2019/060349, incorporated herein by reference in its entirety.

TABLE 6BY
Amino acid sequences of TCR077.

| | | SEQ |
|---|---|---|
| Description | Sequence | ID NO: |
| CDR1α | SSVPPY | 1761 |
| CDR2α | YTSAATLV | 1762 |
| CDR3α | AVSEDSNYQLI | 1763 |
| Vα w/o signal peptide | QSVTQLGSHVSVSEGALVLLRCNYSSSVPPYLFWYVQYPNQGLQLLLKYTSA | 1764 |
| (SignalP) | ATLVKGINGFEAEFKKSETSFHLTKPSAHMSDAAEYFCAVSEDSNYQLIWGA | |
| | GTKLIIKP | |
| Vα w/o signal peptide | AQSVTQLGSHVSVSEGALVLLRCNYSSSVPPYLFWYVQYPNQGLQLLLKYTS | 1765 |
| (IMGT) | AATLVKGINGFEAEFKKSETSFHLTKPSAHMSDAAEYFCAVSEDSNYQLIWG | |
| | AGTKLIIKP | |
| Vα | MXLLLVPVLEVIFTLGGTRAQSVTQLGSHVSVSEGALVLLRCNYSSSVPPYL | 1766 |
| | FWYVQYPNQGLQLLLKYTSAATLVKGINGFEAEFKKSETSFHLTKPSAHMSD | |
| | AAEYFCAVSEDSNYQLIWGAGTKLIIKP | 1767 |
| | (X = any amino acid) | |
| α chain w/WT signal | MLLLLVPVLEVIFTLGGTRAQSVTQLGSHVSVSEGALVLLRCNYSSSVPPYL | 1768 |
| peptide, Cα | FWYVQYPNQGLQLLLKYTSAATLVKGINGFEAEFKKSETSFHLTKPSAHMSD | |
| (substituted) | AAEYFCAVSEDSNYQLIWGAGTKLIIKPNIQNPEPAVYQLKDPRSQDSTLCL | |
| | FTDFDSQINVPKTMESGTFITDKCVLDMKAMDSKSNGAIAWSNQTSFTCQDI | |
| | FKETNATYPSSDVPCDATLTEKSFETDMNLNFQNLLVIVLRILLLKVAGFNL | |
| | LMTLRLWSS | |
| α chain w/alternative | MALLLVPVLEVIFTLGGTRAQSVTQLGSHVSVSEGALVLLRCNYSSSVPPYL | 1769 |
| signal peptide, Cα | FWYVQYPNQGLQLLLKYTSAATLVKGINGFEAEFKKSETSFHLTKPSAHMSD | |
| (substituted) | AAEYFCAVSEDSNYQLIWGAGTKLIIKPNIQNPEPAVYQLKDPRSQDSTLCL | |
| | FTDFDSQINVPKTMESGTFITDKCVLDMKAMDSKSNGAIAWSNQTSFTCQDI | |
| | FKETNATYPSSDVPCDATLTEKSFETDMNLNFQNLLVIVLRILLLKVAGFNL | |
| | LMTLRLWSS | |
| α chain w/alternative | MHLLLVPVLEVIFTLGGTRAQSVTQLGSHVSVSEGALVLLRCNYSSSVPPYL | 1770 |
| signal peptide, Cα | FWYVQYPNQGLQLLLKYTSAATLVKGINGFEAEFKKSETSFHLTKPSAHMSD | |
| (substituted) | AAEYFCAVSEDSNYQLIWGAGTKLIIKPNIQNPEPAVYQLKDPRSQDSTLCL | |
| | FTDFDSQINVPKTMESGTFITDKCVLDMKAMDSKSNGAIAWSNQTSFTCQDI | |
| | FKETNATYPSSDVPCDATLTEKSFETDMNLNFQNLLVIVLRILLLKVAGFNL | |
| | LMTLRLWSS | |
| CDR1ß | GTSNPN | 2761 |
| CDR2ß | SVGIG | 2762 |
| CDR3ß | AYSPGLASDTQY | 2763 |
| Vß w/o signal peptide | QTIHQWPATLVQPVGSPLSLECTVEGTSNPNLYWYRQAAGRGLQLLFYSVGI | 2764 |
| (SignalP) | GQISSEVPQNLSASRPQDRQFILSSKKLLLSDSGFYLCAYSPGLASDTQYFG | |
| | PGTRLTVL | |
| Vß w/o signal peptide | SQTIHQWPATLVQPVGSPLSLECTVEGTSNPNLYWYRQAAGRGLQLLFYSVG | 2765 |
| (IMGT) | IGQISSEVPQNLSASRPQDRQFILSSKKLLLSDSGFYLCAYSPGLASDTQYF | |
| | GPGTRLTVL | |
| Vß | MXCSLLALLLGTFFGVRSQTIHQWPATLVQPVGSPLSLECTVEGTSNPNLYW | 2766 |
| | YRQAAGRGLQLLFYSVGIGQISSEVPQNLSASRPQDRQFILSSKKLLLSDSG | 2767 |
| | FYLCAYSPGLASDTQYFGPGTRLTVL | |
| | (X = any amino acid) | |
| ß chain w/WT signal | MLCSLLALLLGTFFGVRSQTIHQWPATLVQPVGSPLSLECTVEGTSNPNLYW | 2768 |
| peptide, Cß | YRQAAGRGLQLLFYSVGIGQISSEVPQNLSASRPQDRQFILSSKKLLLSDSG | |
| (substituted) | FYLCAYSPGLASDTQYFGPGTRLTVLEDLRNVTPPKVSLFEPSKAEIANKQK | |
| | ATLVCLARGFFPDHVELSWWVNGKEVHSGVCTDPQAYKESNYSYCLSSRLRV | |
| | SATFWHNPRNHFRCQVQFHGLSEEDKWPEGSPKPVTQNISAEAWGRADCGIT | |
| | SASYQQGVLSATILYEILLGKATLYAVLVSTLVVMAMVKRKNS | |
| ß chain w/alternative | MACSLLALLLGTFFGVRSQTIHQWPATLVQPVGSPLSLECTVEGTSNPNLYW | 2769 |
| signal peptide, Cß | YRQAAGRGLQLLFYSVGIGQISSEVPQNLSASRPQDRQFILSSKKLLLSDSG | |
| (substituted) | FYLCAYSPGLASDTQYFGPGTRLTVLEDLRNVTPPKVSLFEPSKAEIANKQK | |
| | ATLVCLARGFFPDHVELSWWVNGKEVHSGVCTDPQAYKESNYSYCLSSRLRV | |
| | SATFWHNPRNHFRCQVQFHGLSEEDKWPEGSPKPVTQNISAEAWGRADCGIT | |
| | SASYQQGVLSATILYEILLGKATLYAVLVSTLVVMAMVKRKNS | |
| ß chain w/alternative | MHCSLLALLLGTFFGVRSQTIHQWPATLVQPVGSPLSLECTVEGTSNPNLYW | 2770 |
| signal peptide, Cß | YRQAAGRGLQLLFYSVGIGQISSEVPQNLSASRPQDRQFILSSKKLLLSDSG | |
| (substituted) | FYLCAYSPGLASDTQYFGPGTRLTVLEDLRNVTPPKVSLFEPSKAEIANKQK | |
| | ATLVCLARGFFPDHVELSWWVNGKEVHSGVCTDPQAYKESNYSYCLSSRLRV | |
| | SATFWHNPRNHFRCQVQFHGLSEEDKWPEGSPKPVTQNISAEAWGRADCGIT | |
| | SASYQQGVLSATILYEILLGKATLYAVLVSTLVVMAMVKRKNS | |

[0241] In some embodiments, TCR077 interacts with and/or is specific for the epidermal growth factor receptor (EGFR) tumor protein. In some embodiments, the peptide is from a neoantigen of EGFR. In some embodiments, the neoantigen has the amino acid changes E746-A750del relative to the wild type EGFR sequence. In some embodiments, TCR077 interacts with the neoantigen in the context of a heterodimer of HLA-DPA1*02:01 and HLA-DPB1*01:01, as described in International Publication No. WO 2019/213195, incorporated herein by reference in its entirety.

TABLE 6BZ
Amino acid sequences of TCR078.

| | | SEQ |
|---|---|---|
| Description | Sequence | ID NO: |
| CDR1α | TSINN | 1771 |
| CDR2α | IRSNERE | 1772 |
| CDR3α | ATDGETSGSRLT | 1773 |
| Vα without signal | QQGEEDPQALSIQEGFNATMNCSYKTSINNLQWYRQNSGRGLVHLILIRSNE | 1774 |
| peptide (SignalP) | REKHSGRLRVTLDTSKKSSSLLITASRAADTASYFCATDGETSGSRLTFGEG | |
| | TQLTVNP | |
| Vα without signal | SQQGEEDPQALSIQEGFNATMNCSYKTSINNLQWYRQNSGRGLVHLILIRSN | 1775 |
| peptide (IMGT) | EREKHSGRLRVTLDTSKKSSSLLITASRAADTASYFCATDGETSGSRLTFGE | |
| | GTQLTVNP | |
| Vα | MXTLLGVSLVILWLQLARVNSQQGEEDPQALSIQEGFNATMNCSYKTSINNL | 1776 |
| | QWYRQNSGRGLVHLILIRSNEREKHSGRLRVTLDTSKKSSSLLITASRAADT | 1777 |
| | ASYFCATDGETSGSRLTFGEGTQLTVNP | |
| | (X = any amino acid) | |
| α chain with WT signal | METLLGVSLVILWLQLARVNSQQGEEDPQALSIQEGFNATMNCSYKTSINNL | 1778 |
| peptide, Cα | QWYRQNSGRGLVHLILIRSNEREKHSGRLRVTLDTSKKSSSLLITASRAADT | |
| (substituted) | ASYFCATDGETSGSRLTFGEGTQLTVNPNIQNPEPAVYQLKDPRSQDSTLCL | |
| | FTDFDSQINVPKTMESGTFITDKCVLDMKAMDSKSNGAIAWSNQTSFTCQDI | |
| | FKETNATYPSSDVPCDATLTEKSFETDMNLNFQNLLVIVLRILLLKVAGFNL | |
| | LMTLRLWSS | |
| α chain with | MATLLGVSLVILWLQLARVNSQQGEEDPQALSIQEGFNATMNCSYKTSINNL | 1779 |
| alternative signal | QWYRQNSGRGLVHLILIRSNEREKHSGRLRVTLDTSKKSSSLLITASRAADT | |
| peptide, Cα | ASYFCATDGETSGSRLTFGEGTQLTVNPNIQNPEPAVYQLKDPRSQDSTLCL | |
| (substituted) | FTDFDSQINVPKTMESGTFITDKCVLDMKAMDSKSNGAIAWSNQTSFTCQDI | |
| | FKETNATYPSSDVPCDATLTEKSFETDMNLNFQNLLVIVLRILLLKVAGFNL | |
| | LMTLRLWSS | |
| α chain with | MHTLLGVSLVILWLQLARVNSQQGEEDPQALSIQEGFNATMNCSYKTSINNL | 1780 |
| alternative signal | QWYRQNSGRGLVHLILIRSNEREKHSGRLRVTLDTSKKSSSLLITASRAADT | |
| peptide, Cα | ASYFCATDGETSGSRLTFGEGTQLTVNPNIQNPEPAVYQLKDPRSQDSTLCL | |
| (substituted) | FTDFDSQINVPKTMESGTFITDKCVLDMKAMDSKSNGAIAWSNQTSFTCQDI | |
| | FKETNATYPSSDVPCDATLTEKSFETDMNLNFQNLLVIVLRILLLKVAGFNL | |
| | LMTLRLWSS | |
| CDR1ß | DFQATT | 2771 |
| CDR2ß | SNEGSKA | 2772 |
| CDR3ß | SASRGATGQPQH | 2773 |
| Vß without signal | AVVSQHPSWVICKSGTSVKIECRSLDFQATTMFWYRQFPKQSLMLMATSNEG | 2774 |
| peptide (SignalP) | SKATYEQGVEKDKFLINHASLTLSTLTVTSAHPEDSSFYICSASRGATGQPQ | |
| | HFGDGTRLSIL | |
| Vß without signal | GAVVSQHPSWVICKSGTSVKIECRSLDFQATTMFWYRQFPKQSLMLMATSNE | 2775 |
| peptide (IMGT) | GSKATYEQGVEKDKFLINHASLTLSTLTVTSAHPEDSSFYICSASRGATGQP | |
| | QHFGDGTRLSIL | |
| Vß | MXLLLLLLGPGSGLGAVVSQHPSWVICKSGTSVKIECRSLDFQATTMFWYRQ | 2776 |
| | FPKQSLMLMATSNEGSKATYEQGVEKDKFLINHASLTLSTLTVTSAHPEDSS | 2777 |
| | FYICSASRGATGQPQHFGDGTRLSIL | |
| | (X = any amino acid) | |
| ß chain with WT signal | MLLLLLLLGPGSGLGAVVSQHPSWVICKSGTSVKIECRSLDFQATTMFWYRQ | 2778 |
| peptide, Cß | FPKQSLMLMATSNEGSKATYEQGVEKDKFLINHASLTLSTLTVTSAHPEDSS | |
| (substituted) | FYICSASRGATGQPQHFGDGTRLSILEDLRNVTPPKVSLFEPSKAEIANKQK | |
| | ATLVCLARGFFPDHVELSWWVNGKEVHSGVCTDPQAYKESNYSYCLSSRLRV | |
| | SATFWHNPRNHFRCQVQFHGLSEEDKWPEGSPKPVTQNISAEAWGRADCGIT | |
| | SASYQQGVLSATILYEILLGKATLYAVLVSTLVVMAMVKRKNS | |
| ß chain with alternative | MALLLLLLGPGSGLGAVVSQHPSWVICKSGTSVKIECRSLDFQATTMFWYRQ | 2779 |
| signal peptide, Cß | FPKQSLMLMATSNEGSKATYEQGVEKDKFLINHASLTLSTLTVTSAHPEDSS | |
| (substituted) | FYICSASRGATGQPQHFGDGTRLSILEDLRNVTPPKVSLFEPSKAEIANKQK | |
| | ATLVCLARGFFPDHVELSWWVNGKEVHSGVCTDPQAYKESNYSYCLSSRLRV | |
| | SATFWHNPRNHFRCQVQFHGLSEEDKWPEGSPKPVTQNISAEAWGRADCGIT | |
| | SASYQQGVLSATILYEILLGKATLYAVLVSTLVVMAMVKRKNS | |
| ß chain with alternative | MHLLLLLLGPGSGLGAVVSQHPSWVICKSGTSVKIECRSLDFQATTMFWYRQ | 2789 |
| signal peptide, Cß | FPKQSLMLMATSNEGSKATYEQGVEKDKFLINHASLTLSTLTVTSAHPEDSS | |
| (substituted) | FYICSASRGATGQPQHFGDGTRLSILEDLRNVTPPKVSLFEPSKAEIANKQK | |
| | ATLVCLARGFFPDHVELSWWVNGKEVHSGVCTDPQAYKESNYSYCLSSRLRV | |
| | SATFWHNPRNHFRCQVQFHGLSEEDKWPEGSPKPVTQNISAEAWGRADCGIT | |
| | SASYQQGVLSATILYEILLGKATLYAVLVSTLVVMAMVKRKNS | |

[0242] In some embodiments, TCR078 interacts with and/or is specific for KRAS. In some embodiments, the peptide is from a neoantigen of KRAS. In some embodiments, the neoantigen has the amino acid change G12V relative to the wild type KRAS sequence. In some embodiments, TCR078 interacts with the neoantigen in the context of an HLA-DPA1*01:03 chain and an HLA-DPB1*03:01 chain, as described in International Publication No. WO 2021/173902, incorporated herein by reference in its entirety.

TABLE 6CA
Amino acid sequences of TCR079.

| | | SEQ |
|---|---|---|
| Description | Sequence | ID NO: |
| CDR1α | NSASDY | 1781 |
| CDR2α | IRSNMDK | 1782 |
| CDR3α | AERGRGGKLI | 1783 |
| Vα without signal | ESVGLHLPTLSVQEGDNSIINCAYSNSASDYFIWYKQESGKGPQFIIDIRSN | 1784 |
| peptide (SignalP) | MDKRQGQRVTVLLNKTVKHLSLQIAATQPGDSAVYFCAERGRGGKLIFGQGT | |
| | ELSVKP | |
| Vα without signal | GESVGLHLPTLSVQEGDNSIINCAYSNSASDYFIWYKQESGKGPQFIIDIRS | 1785 |
| peptide (IMGT) | NMDKRQGQRVTVLLNKTVKHLSLQIAATQPGDSAVYFCAERGRGGKLIFGQG | |
| | TELSVKP | |
| Vα | MXGIRALFMYLWLQLDWVSRGESVGLHLPTLSVQEGDNSIINCAYSNSASDY | 1786 |
| | FIWYKQESGKGPQFIIDIRSNMDKRQGQRVTVLLNKTVKHLSLQIAATQPGD | |
| | SAVYFCAERGRGGKLIFGQGTELSVKP | 1787 |
| | (X = any amino acid) | |
| α chain with WT signal | MAGIRALFMYLWLQLDWVSRGESVGLHLPTLSVQEGDNSIINCAYSNSASDY | 1788 |
| peptide, Cα | FIWYKQESGKGPQFIIDIRSNMDKRQGQRVTVLLNKTVKHLSLQIAATQPGD | |
| (substituted) | SAVYFCAERGRGGKLIFGQGTELSVKPNIQNPEPAVYQLKDPRSQDSTLCLF | |
| | TDFDSQINVPKTMESGTFITDKCVLDMKAMDSKSNGAIAWSNQTSFTCQDIF | |
| | KETNATYPSSDVPCDATLTEKSFETDMNLNFQNLLVIVLRILLLKVAGFNLL | |
| | MTLRLWSS | |
| α chain with | MAGIRALFMYLWLQLDWVSRGESVGLHLPTLSVQEGDNSIINCAYSNSASDY | 1789 |
| alternative signal | FIWYKQESGKGPQFIIDIRSNMDKRQGQRVTVLLNKTVKHLSLQIAATQPGD | |
| peptide, Cα | SAVYFCAERGRGGKLIFGQGTELSVKPNIQNPEPAVYQLKDPRSQDSTLCLF | |
| (substituted) | TDFDSQINVPKTMESGTFITDKCVLDMKAMDSKSNGAIAWSNQTSFTCQDIF | |
| | KETNATYPSSDVPCDATLTEKSFETDMNLNFQNLLVIVLRILLLKVAGFNLL | |
| | MTLRLWSS | |
| α chain with | MHGIRALFMYLWLQLDWVSRGESVGLHLPTLSVQEGDNSIINCAYSNSASDY | 1790 |
| alternative signal | FIWYKQESGKGPQFIIDIRSNMDKRQGQRVTVLLNKTVKHLSLQIAATQPGD | |
| peptide, Cα | SAVYFCAERGRGGKLIFGQGTELSVKPNIQNPEPAVYQLKDPRSQDSTLCLF | |
| (substituted) | TDFDSQINVPKTMESGTFITDKCVLDMKAMDSKSNGAIAWSNQTSFTCQDIF | |
| | KETNATYPSSDVPCDATLTEKSFETDMNLNFQNLLVIVLRILLLKVAGFNLL | |
| | MTLRLWSS | |
| CDR1ß | DFQATT | 2781 |
| CDR2ß | SNEGSKA | 2782 |
| CDR3B | SAGRASTDTQY | 2783 |
| Vß without signal | GSGLGAVVSQHPSWVICKSGTSVKIECRSLDFQATTMFWYRQFPKQSLMLMA | 2784 |
| peptide (SignalP) | TSNEGSKATYEQGVEKDKFLINHASLTLSTLTVTSAHPEDSSFYICSAGRAS | |
| | TDTQYFGPGTRLTVL | |
| Vß without signal | GAVVSQHPSWVICKSGTSVKIECRSLDFQATTMFWYRQFPKQSLMLMATSNE | 2785 |
| peptide (IMGT) | GSKATYEQGVEKDKFLINHASLTLSTLTVTSAHPEDSSFYICSAGRASTDTQ | |
| | YFGPGTRLTVL | |
| Vß | MXLLLLLLGPGISLLLPGSLAGSGLGAVVSQHPSWVICKSGTSVKIECRSLD | 2786 |
| | FQATTMFWYRQFPKQSLMLMATSNEGSKATYEQGVEKDKFLINHASLTLSTL | |
| | TVTSAHPEDSSFYICSAGRASTDTQYFGPGTRLTVL | 2787 |
| | (X = any amino acid) | |
| ß chain with WT signal | MLLLLLLLGPGISLLLPGSLAGSGLGAVVSQHPSWVICKSGTSVKIECRSLD | 2788 |
| peptide, Cß | FQATTMFWYRQFPKQSLMLMATSNEGSKATYEQGVEKDKFLINHASLTLSTL | |
| (substituted) | TVTSAHPEDSSFYICSAGRASTDTQYFGPGTRLTVLEDLRNVTPPKVSLFEP | |
| | SKAEIANKQKATLVCLARGFFPDHVELSWWVNGKEVHSGVCTDPQAYKESNY | |
| | SYCLSSRLRVSATFWHNPRNHFRCQVQFHGLSEEDKWPEGSPKPVTQNISAE | |
| | AWGRADCGITSASYQQGVLSATILYEILLGKATLYAVLVSTLVVMAMVKRKN | |
| | S | |
| ß chain with alternative | MALLLLLLGPGISLLLPGSLAGSGLGAVVSQHPSWVICKSGTSVKIECRSLD | 2789 |
| signal peptide, Cß | FQATTMFWYRQFPKQSLMLMATSNEGSKATYEQGVEKDKFLINHASLTLSTL | |
| (substituted) | TVTSAHPEDSSFYICSAGRASTDTQYFGPGTRLTVLEDLRNVTPPKVSLFEP | |
| | SKAEIANKQKATLVCLARGFFPDHVELSWWVNGKEVHSGVCTDPQAYKESNY | |
| | SYCLSSRLRVSATFWHNPRNHFRCQVQFHGLSEEDKWPEGSPKPVTQNISAE | |
| | AWGRADCGITSASYQQGVLSATILYEILLGKATLYAVLVSTLVVMAMVKRKN | |
| | S | |
| ß chain with alternative | MHLLLLLLGPGISLLLPGSLAGSGLGAVVSQHPSWVICKSGTSVKIECRSLD | 2790 |
| signal peptide, Cß | FQATTMFWYRQFPKQSLMLMATSNEGSKATYEQGVEKDKFLINHASLTLSTL | |
| (substituted) | TVTSAHPEDSSFYICSAGRASTDTQYFGPGTRLTVLEDLRNVTPPKVSLFEP | |
| | SKAEIANKQKATLVCLARGFFPDHVELSWWVNGKEVHSGVCTDPQAYKESNY | |
| | SYCLSSRLRVSATFWHNPRNHERCQVQFHGLSEEDKWPEGSPKPVTQNISAE | |
| | AWGRADCGITSASYQQGVLSATILYEILLGKATLYAVLVSTLVVMAMVKRKN | |
| | S | |

[0243] In some embodiments, TCR079 interacts with and/or is specific for KRAS. In some embodiments, the peptide is from a neoantigen of KRAS. In some embodiments, the neoantigen has the amino acid change G12V relative to the wild type KRAS sequence. In some embodiments, TCR079 interacts with the neoantigen in the context of an HLA-DPA1*01:03 chain and an HLA-DPB1*03:01 chain, as described in International Publication No. WO 2021/173902, incorporated herein by reference in its entirety.

TABLE 6CB
Amino acid sequences of TCR080

| | | SEQ |
|---|---|---|
| Description | Sequence | ID NO: |
| CDR1α | NSASDY | 1791 |
| CDR2α | IRSNMDK | 1792 |
| CDR3α | AERGRGGKLI | 1793 |
| Vα without signal | ESVGLHLPTLSVQEGDNSIINCAYSNSASDYFIWYKQESGKGPQFIIDIRSN | 1794 |
| peptide (SignalP) | MDKRQGQRVTVLLNKTVKHLSLQIAATQPGDSAVYFCAERGRGGKLIFGQGT | |
| | ELSVKP | |
| Vα without signal | GESVGLHLPTLSVQEGDNSIINCAYSNSASDYFIWYKQESGKGPQFIIDIRS | 1795 |
| peptide (IMGT) | NMDKRQGQRVTVLLNKTVKHLSLQIAATQPGDSAVYFCAERGRGGKLIFGQG | |
| | TELSVKP | |
| Vα | MXGIRALFMYLWLQLDWVSRGESVGLHLPTLSVQEGDNSIINCAYSNSASDY | 1796 |
| | FIWYKQESGKGPQFIIDIRSNMDKRQGQRVTVLLNKTVKHLSLQIAATQPGD | 1797 |
| | SAVYFCAERGRGGKLIFGQGTELSVKP | |
| | (X = any amino acid) | |
| α chain with WT signal | MAGIRALFMYLWLQLDWVSRGESVGLHLPTLSVQEGDNSIINCAYSNSASDY | 1798 |
| peptide, Cα | FIWYKQESGKGPQFIIDIRSNMDKRQGQRVTVLLNKTVKHLSLQIAATQPGD | |
| (substituted) | SAVYFCAERGRGGKLIFGQGTELSVKPNIQNPEPAVYQLKDPRSQDSTLCLF | |
| | TDFDSQINVPKTMESGTFITDKCVLDMKAMDSKSNGAIAWSNQTSFTCQDIF | |
| | KETNATYPSSDVPCDATLTEKSFETDMNLNFQNLLVIVLRILLLKVAGFNLL | |
| | MTLRLWSS | |
| α chain with | MAGIRALFMYLWLQLDWVSRGESVGLHLPTLSVQEGDNSIINCAYSNSASDY | 1799 |
| alternative signal | FIWYKQESGKGPQFIIDIRSNMDKRQGQRVTVLLNKTVKHLSLQIAATQPGD | |
| peptide, Cα | SAVYFCAERGRGGKLIFGQGTELSVKPNIQNPEPAVYQLKDPRSQDSTLCLF | |
| (substituted) | TDFDSQINVPKTMESGTFITDKCVLDMKAMDSKSNGAIAWSNQTSFTCQDIF | |
| | KETNATYPSSDVPCDATLTEKSFETDMNLNFQNLLVIVLRILLLKVAGFNLL | |
| | MTLRLWSS | |
| α chain with | MHGIRALFMYLWLQLDWVSRGESVGLHLPTLSVQEGDNSIINCAYSNSASDY | 1800 |
| alternative signal | FIWYKQESGKGPQFIIDIRSNMDKRQGQRVTVLLNKTVKHLSLQIAATQPGD | |
| peptide, Cα | SAVYFCAERGRGGKLIFGQGTELSVKPNIQNPEPAVYQLKDPRSQDSTLCLF | |
| (substituted) | TDFDSQINVPKTMESGTFITDKCVLDMKAMDSKSNGAIAWSNQTSFTCQDIF | |
| | KETNATYPSSDVPCDATLTEKSFETDMNLNFQNLLVIVLRILLLKVAGFNLL | |
| | MTLRLWSS | |
| CDR1ß | DFQATT | 2791 |
| CDR2ß | SNEGSKA | 2792 |
| CDR3ß | SAGRASTDTQY | 2793 |
| VßB without signal | AVVSQHPSWVICKSGTSVKIECRSLDFQATTMFWYRQFPKQSLMLMATSNEG | 2794 |
| peptide (SignalP) | SKATYEQGVEKDKFLINHASLTLSTLTVTSAHPEDSSFYICSAGRASTDTQY | |
| | FGPGTRLTVL | |
| Vß without signal | GAVVSQHPSWVICKSGTSVKIECRSLDFQATTMFWYRQFPKQSLMLMATSNE | 2795 |
| peptide (IMGT) | GSKATYEQGVEKDKFLINHASLTLSTLTVTSAHPEDSSFYICSAGRASTDTQ | |
| | YFGPGTRLTVL | |
| Vß | MXLLLLLLGPGSGLGAVVSQHPSWVICKSGTSVKIECRSLDFQATTMFWYRQ | 2796 |
| | FPKQSLMLMATSNEGSKATYEQGVEKDKFLINHASLTLSTLTVTSAHPEDSS | 2797 |
| | FYICSAGRASTDTQYFGPGTRLTVL | |
| | (X = any amino acid) | |
| ß chain with WT signal | MLLLLLLLGPGSGLGAVVSQHPSWVICKSGTSVKIECRSLDFQATTMFWYRQ | 2798 |
| peptide, Cß | FPKQSLMLMATSNEGSKATYEQGVEKDKFLINHASLTLSTLTVTSAHPEDSS | |
| (substituted) | FYICSAGRASTDTQYFGPGTRLTVLEDLRNVTPPKVSLFEPSKAEIANKQKA | |
| | TLVCLARGFFPDHVELSWWVNGKEVHSGVCTDPQAYKESNYSYCLSSRLRVS | |
| | ATFWHNPRNHFRCQVQFHGLSEEDKWPEGSPKPVTQNISAEAWGRADCGITS | |
| | ASYQQGVLSATILYEILLGKATLYAVLVSTLVVMAMVKRKNS | |
| ß chain with alternative | MALLLLLLGPGSGLGAVVSQHPSWVICKSGTSVKIECRSLDFQATTMFWYRQ | 2799 |
| signal peptide, Cß | FPKQSLMLMATSNEGSKATYEQGVEKDKFLINHASLTLSTLTVTSAHPEDSS | |
| (substituted) | FYICSAGRASTDTQYFGPGTRLTVLEDLRNVTPPKVSLFEPSKAEIANKQKA | |
| | TLVCLARGFFPDHVELSWWVNGKEVHSGVCTDPQAYKESNYSYCLSSRLRVS | |
| | ATFWHNPRNHFRCQVQFHGLSEEDKWPEGSPKPVTQNISAEAWGRADCGITS | |
| | ASYQQGVLSATILYEILLGKATLYAVLVSTLVVMAMVKRKNS | |
| ß chain with alternative | MHLLLLLLGPGSGLGAVVSQHPSWVICKSGTSVKIECRSLDFQATTMFWYRQ | 2800 |
| signal peptide, Cß | FPKQSLMLMATSNEGSKATYEQGVEKDKFLINHASLTLSTLTVTSAHPEDSS | |
| (substituted) | FYICSAGRASTDTQYFGPGTRLTVLEDLRNVTPPKVSLFEPSKAEIANKQKA | |
| | TLVCLARGFFPDHVELSWWVNGKEVHSGVCTDPQAYKESNYSYCLSSRLRVS | |
| | ATFWHNPRNHFRCQVQFHGLSEEDKWPEGSPKPVTQNISAEAWGRADCGITS | |
| | ASYQQGVLSATILYEILLGKATLYAVLVSTLVVMAMVKRKNS | |

[0244] In some embodiments, TCR080 interacts with and/or is specific for KRAS. In some embodiments, the peptide is from a neoantigen of KRAS. In some embodiments, the neoantigen has the amino acid change G12V relative to the wild type KRAS sequence. In some embodiments, TCR080 interacts with the neoantigen in the context of an HLA-DPA1*01:03 chain and an HLA-DPB1*03:01 chain, as described in International Publication No. WO 2021/173902, incorporated herein by reference in its entirety.

[0245] The disclosure also provides for the use of other TCR Vα and Vβ sequences, as well as any other alpha or beta chains, in the polycistronic vectors, engineered cells or pharmaceutical compositions described herein. These TCR Vα and Vβ sequences and alpha or beta chains include those described in International Publication Nos. WO 2016/085904, WO 2017/048593, WO 2018/026691, WO 2019/060349, WO 2019/067243, WO 2019/070435, WO 2019/112941, WO 2019/213195, WO 2020/086827, WO 2020/154275, WO 2020/264269, WO 2021/163434, WO 2021/163477, and WO 2021/173902 incorporated by reference herein in their entireties.

[0246] The CDRs of a TCR disclosed herein can be defined using any art recognized numbering convention. Additionally or alternatively, the CDRs can be defined empirically, e.g., based upon structural analysis of the interaction of the TCR with a cognate antigen (e.g., a peptide or a peptide-MHC complex). In some embodiments, CDR3 of the TCR can further comprise an N-terminal cysteine and/or a C-terminal phenylalanine or tryptophan.

[0247] The TCRs disclosed herein can be used in any TCR structural format. For example, in certain embodiments, the TCR is a full-length TCR comprising a full-length α chain and a full-length β chain. The transmembrane regions (and optionally also the cytoplasmic regions) can be removed from a full-length TCR to produce a soluble TCR. Accordingly, in certain embodiments, the TCR is a soluble TCR lacking transmembrane and/or cytoplasmic region(s). The methods of producing soluble TCRs are well-known in the art. In some embodiments, the soluble TCR comprises an engineered disulfide bond that facilitates dimerization, see, e.g., U.S. Pat. No. 7,329,731, which is incorporated by reference herein in its entirety. In some embodiments, the soluble TCR is generated by fusing the extracellular domain of a TCR described herein to other protein domains, e.g., maltose binding protein, thioredoxin, human constant kappa domain, or leucine zippers, see, e.g., Løset et al., Front Oncol. 2014; 4: 378, which is incorporated by reference herein in its entirety. A single-chain TCR (scTCR) comprising Vα and Vβ linked by a peptide linker can also be generated. Such scTCRs can comprise Vα and Vβ, each linked to a TCR constant region. Alternatively, the scTCRs can comprise Vα and Vβ, where either the Vα, the Vβ, or both the Vα and Vβ are not linked to a TCR constant region. Exemplary scTCRs are described in PCT Publication Nos. WO 2003/020763, WO 2004/033685, and WO 2011/044186, each of which is incorporated by reference herein in its entirety. Furthermore, the TCRs disclosed herein can comprise two polypeptide chains (e.g., an a chain and a β chain) in which the chains have been engineered to each have a cysteine residue that can form an interchain disulfide bond. Accordingly, in certain embodiments, the TCRs disclosed herein comprise two polypeptide chains linked by an engineered disulfide bond. Exemplary TCRs having an engineered disulfide bond are described in U.S. Pat. Nos. 8,361,794 and 8,906,383, each of which is incorporated by reference herein in its entirety.

[0248] In certain embodiments, the TCRs disclosed herein comprise one or more chains (e.g., an α chain and/or a β chain) having a transmembrane region. In certain embodiments, the TCRs disclosed herein comprise two chains (e.g., an α chain and a β chain) having a transmembrane region. The transmembrane region can be the endogenous transmembrane region of that TCR chain, a variant of the endogenous transmembrane region, or a heterologous transmembrane region. In certain embodiments, the TCRs disclosed herein comprise an α chain and a β chain having endogenous transmembrane regions.

[0249] In certain embodiments, the TCRs disclosed herein comprise one or more chains (e.g., an α chain and/or a β chain) having a cytoplasmic region. In certain embodiments, the TCRs disclosed herein comprise two chains (e.g., an α chain and a β chain) each having a cytoplasmic region. The cytoplasmic region can be the endogenous cytoplasmic region of that TCR chain, variant of the endogenous cytoplasmic region, or a heterologous cytoplasmic region. In certain embodiments, the TCRs disclosed herein comprise two chains (e.g., an α chain and a β chain) where both chains have transmembrane regions, but one chain is lacking a cytoplasmic region. In certain embodiments, the TCRs disclosed herein comprise two chains (e.g., an α chain and a p chain) where both chains have endogenous transmembrane regions but lack an endogenous cytoplasmic region. In certain embodiments, the TCRs disclosed herein comprise an α chain and a β chain where both chains have endogenous transmembrane regions but lack an endogenous cytoplasmic region. In certain embodiments, the TCRs disclosed herein comprise a co-stimulatory signaling region from a co-stimulatory molecule; see, e.g., PCT Publication Nos.: WO 1996/018105, WO 1999/057268, and WO 2000/031239, and U.S. Pat. No. 7,052,906, all of which are incorporated herein by reference in their entireties.

[0250] In certain embodiments, the instant disclosure provides a polypeptide comprising an α chain variable region (Vα) and a β chain variable region (Vβ) of a TCR fused together. For example, such polypeptide may comprise, in order, the Vα and Vβ, or the Vβ and the Vα, optionally with a linker (e.g., a peptide linker) between the two regions. For example, a Furin and/or a 2A cleavage site (e.g., one of the sequences in Tables 2 or 3), or combinations thereof, may be used in the linker for the Vα/Vβ fusion polypeptide. In certain embodiments, the instant disclosure provides a polypeptide comprising an α chain and a β chain of a TCR fused together. For example, such polypeptide may comprise, in order, an α chain and a β chain, or a β chain and an a chain, optionally with a linker (e.g., a peptide linker) between the two chains. For example, a Furin and/or a 2A cleavage site (e.g., one of the sequences in Tables 2 or 3), or combinations thereof, may be used in the linker for the a/P fusion polypeptide. For example, a fusion polypeptide may comprise, from the N-terminus to the C-terminus: the a chain of a TCR, a furin cleavage site, a 2A cleavage site, and the β chain of the TCR. In certain embodiments, the polypeptide comprises, from the N-terminus to the C-terminus: the β chain of a TCR, a furin cleavage site, a 2A element, and the a chain of the TCR.

### 1.3 IL-15/IL-15Rα Fusion Proteins

[0251] The disclosure also provides recombinant vectors that include cytokines. In some embodiments, the cytokine is an interleukin. In some embodiments, the cytokine is membrane bound. In some embodiments, the cytokine is a fusion protein comprising a soluble cytokine, or a functional fragment or functional variant thereof, operably linked to a cognate receptor of the cytokine, or a functional fragment or functional variant thereof, optionally a membrane-bound form thereof. In some embodiments, the fusion protein comprises human IL-15 (hIL-15) operably linked to human IL-15Rα (hIL-15Rα). In membrane-bound form, this fusion protein is referred to herein as membrane bound IL-15 (mbIL15). In some embodiments, hIL-15 is directly operably linked to hIL-15Rα. In some embodiments, hIL-15 is indirectly operably linked to hIL-15Rα. In some embodiments, hIL-15 is indirectly operably linked to hIL-15Rα via a peptide linker.

[0252] In some embodiments, the peptide linker comprises the amino acid sequence of SEQ ID NO: 81, or an amino acid sequence comprising 1, 2, 3, 4 or 5 amino acid modifications to the amino acid sequence of SEQ ID NO: 81. In some embodiments, the linker comprises the amino acid sequence of SEQ ID NO: 81. In some embodiments, the amino acid of the linker consists of the amino acid sequence of SEQ ID NO: 81, or an amino acid sequence comprising 1, 2, 3, 4 or 5 amino acid modifications to the amino acid sequence of SEQ ID NO: 81. In some embodiments, the amino acid of the linker consists of the amino acid sequence of SEQ ID NO: 81.

[0253] In some embodiments, the linker is encoded by a polynucleotide sequence at least 95%, 96%, 97%, 98%, 99%, or 100% identical to the polynucleotide sequence of SEQ ID NO: 82. In some embodiments, the linker is encoded by the polynucleotide sequence of SEQ ID NO: 82. In some embodiments, hIL-15 comprises an amino acid sequence at least 95%, 96%, 97%, 98%, 99% or 100% identical to the amino acid sequence of SEQ ID NO: 76. In some embodiments, hIL-15 comprises the amino acid sequence of SEQ ID NO: 76. In some embodiments, the amino acid sequence of hIL-15 consists of a sequence at least 95%, 96%, 97%, 98%, 99% or 100% identical to the amino acid sequence of SEQ ID NO: 76. In some embodiments, the amino acid sequence of hIL-15 consists of the amino acid sequence of SEQ ID NO: 76.

[0254] In some embodiments, hIL-15 is encoded by a polynucleotide sequence at least 75%, 80%, 85%, 90%, 95%, 96%, 97%, 98%, 99%, or 100% identical to the polynucleotide sequence of SEQ ID NO: 77. In some embodiments, hIL-15 is encoded by the polynucleotide sequence of SEQ ID NO: 77.

[0255] In some embodiments, hIL-15Rα comprises an amino acid sequence at least 95%, 96%, 97%, 98%, 99% or 100% identical to the amino acid sequence of SEQ ID NO: 78. In some embodiments, hIL-15Rα comprises the amino acid sequence of SEQ ID NO: 78. In some embodiments, the amino acid sequence of hIL-15Rα consists of a sequence at least 95%, 96%, 97%, 98%, 99% or 100% identical to the amino acid sequence of SEQ ID NO: 78. In some embodiments, the amino acid sequence of hIL-15Rα consists of the amino acid sequence of SEQ ID NO: 78.

[0256] In some embodiments, hIL-15Rα is encoded by a polynucleotide sequence at least 75%, 80%, 85%, 90%, 95%, 96%, 97%, 98%, 99%, or 100% identical to the polynucleotide sequence of SEQ ID NO: 79. In some embodiments, hIL-15Rα is encoded by the polynucleotide sequence of SEQ ID NO: 79

[0257] In some embodiments, the fusion protein comprises an amino acid sequence at least 95%, 96%, 97%, 98%, 99% or 100% identical to SEQ ID NO: 70 or 73. In some embodiments, the fusion protein comprises an amino acid sequence at least 95%, 96%, 97%, 98%, 99% or 100% identical to SEQ ID NO: 70. In some embodiments, the fusion protein comprises an amino acid sequence at least 95%, 96%, 97%, 98%, 99% or 100% identical to SEQ ID NO: 73. In some embodiments, the fusion protein comprises the amino acid sequence of SEQ ID NO: 70 or 73. In some embodiments, the fusion protein comprises the amino acid sequence of SEQ ID NO: 70. In some embodiments, the fusion protein comprises the amino acid sequence of SEQ ID NO: 73.

[0258] In some embodiments, the amino acid sequence of the fusion protein consists of a sequence at least 95%, 96%, 97%, 98%, 99% or 100% identical to the amino acid sequence of SEQ ID NO: 70 or 73. In some embodiments, the amino acid sequence of the fusion protein consists of a sequence at least 95%, 96%, 97%, 98%, 99% or 100% identical to the amino acid sequence of SEQ ID NO: 70. In some embodiments, the amino acid sequence of the fusion protein consists of a sequence at least 95%, 96%, 97%, 98%, 99% or 100% identical to the amino acid sequence of SEQ ID NO: 73. In some embodiments, the amino acid sequence of the fusion protein consists of the amino acid sequence of SEQ ID NO: 70 or 73. In some embodiments, the amino acid sequence of the fusion protein consists of the amino acid sequence of SEQ ID NO: 70. In some embodiments, the amino acid sequence of the fusion protein consists of the amino acid sequence of SEQ ID NO: 73.

[0259] In some embodiments, the fusion protein is encoded by a polynucleotide sequence at least 75%, 80%, 85%, 90%, 95%, 96%, 97%, 98%, 99% or 100% identical to the polynucleotide sequence of SEQ ID NO: 71 or 74. In some embodiments, the fusion protein is encoded by a polynucleotide sequence at least 75%, 80%, 85%, 90%, 95%, 96%, 97%, 98%, 99% or 100% identical to the polynucleotide sequence of SEQ ID NO: 71. In some embodiments, the fusion protein is encoded by a polynucleotide sequence at least 75%, 80%, 85%, 90%, 95%, 96%, 97%, 98%, 99% or 100% identical to the polynucleotide sequence of SEQ ID NO: 74.

[0260] In some embodiments, the fusion protein is encoded by the polynucleotide sequence of SEQ ID NO: 71 or 74. In some embodiments, the fusion protein is encoded by the polynucleotide sequence of SEQ ID NO: 71. In some embodiments, the fusion protein is encoded by the polynucleotide sequence of SEQ ID NO: 74.

[0261] Exemplary cytokine fusion proteins and components thereof are disclosed in Table 7. Additional exemplary mbIL15 fusions are disclosed in Hurton et al., “Tethered IL-15 augments antitumor activity and promotes a stem-cell memory subset in tumor-specific T cells,” PNAS, 113(48) E7788-E7797 (2016), the entire contents of which are incorporated by reference herein.

[0262] The amino acid sequence and polynucleotide sequence of exemplary cytokine fusion proteins and component polypeptides are provided in Table 7, herein.

TABLE 7
Amino acid and polynucleotide sequences of exemplary IL-15/IL-15RRα fusion
proteins and components thereof.

| Description | Sequence | SEQ ID NO |
|---|---|---|
| mbIL15 (with N- | MDWTWILFLVAAATRVHSNWVNVISDLKKIEDLIQSMHIDATLYTESDVHPSCK | 70 |
| terminal signal | VTAMKCFLLELQVISLESGDASIHDTVENLIILANNSLSSNGNVTESGCKECEE | |
| sequence) | LEEKNIKEFLQSFVHIVQMFINTSSGGGSGGGGSGGGGSGGGGSGGGSLQITCP | |
| (exemplary amino | PPMSVEHADIWVKSYSLYSRERYICNSGFKRKAGTSSLTECVLNKATNVAHWTT | |
| acid sequence) | PSLKCIRDPALVHQRPAPPSTVTTAGVTPQPESLSPSGKEPAASSPSSNNTAAT | |
| | TAAIVPGSQLMPSKSPSTGTTEISSHESSHGTPSQTTAKNWELTASASHQPPGV | |
| | YPQGHSDTTVAISTSTVLLCGLSAVSLLACYLKSRQTPPLASVEMEAMEALPVT | |
| | WGTSSRDEDLENCSHHL | |
| mbIL15 (with N- | ATGGATTGGACCTGGATTCTGTTTCTGGTGGCCGCTGCCACAAGAGTGCACAGC | 71 |
| terminal signal | AACTGGGTGAATGTGATCAGCGACCTGAAGAAGATCGAGGATCTGATCCAGAGC | |
| sequence) | ATGCACATTGATGCCACCCTGTACACAGAATCTGATGTGCACCCTAGCTGTAAA | |
| (exemplary | GTGACCGCCATGAAGTGTTTTCTGCTGGAGCTGCAGGTGATTTCTCTGGAAAGC | |
| nucleotide | GGAGATGCCTCTATCCACGACACAGTGGAGAATCTGATCATCCTGGCCAACAAT | |
| sequence) | AGCCTGAGCAGCAATGGCAATGTGACAGAGTCTGGCTGTAAGGAGTGTGAGGAG | |
| | CTGGAGGAGAAGAACATCAAGGAGTTTCTGCAGAGCTTTGTGCACATCGTGCAG | |
| | ATGTTCATCAATACAAGCTCTGGCGGAGGATCTGGAGGAGGCGGATCTGGAGGA | |
| | GGAGGCAGTGGAGGCGGAGGATCTGGCGGAGGATCTCTGCAGATTACATGCCCT | |
| | CCTCCAATGTCTGTGGAGCACGCCGATATTTGGGTGAAGTCCTACAGCCTGTAC | |
| | AGCAGAGAGAGATACATCTGCAACAGCGGCTTTAAGAGAAAGGCCGGCACCTCT | |
| | TCTCTGACAGAGTGCGTGCTGAATAAGGCCACAAATGTGGCCCACTGGACAACA | |
| | CCTAGCCTGAAGTGCATTAGAGATCCTGCCCTGGTCCACCAGAGGCCTGCCCCT | |
| | CCATCTACAGTGACAACAGCCGGAGTGACACCTCAGCCTGAATCTCTGAGCCCT | |
| | TCTGGAAAAGAACCTGCCGCCAGCTCTCCTAGCTCTAATAATACCGCCGCCACA | |
| | ACAGCCGCCATTGTGCCTGGATCTCAGCTGATGCCTAGCAAGTCTCCTAGCACA | |
| | GGCACAACAGAGATCAGCAGCCACGAATCTTCTCACGGAACACCTTCTCAGACC | |
| | ACCGCCAAGAATTGGGAGCTGACAGCCTCTGCCTCTCACCAGCCTCCAGGAGTG | |
| | TATCCTCAGGGCCACTCTGATACAACAGTGGCCATCAGCACATCTACAGTGCTG | |
| | CTGTGTGGACTGTCTGCCGTGTCTCTGCTGGCCTGTTACCTGAAGTCTAGACAG | |
| | ACACCTCCTCTGGCCTCTGTGGAGATGGAGGCCATGGAAGCCCTGCCTGTGACA | |
| | TGGGGAACAAGCAGCAGAGATGAAGACCTGGAGAATTGTTCTCACCACCTG | |
| mbIL15 (without | NWVNVISDLKKIEDLIQSMHIDATLYTESDVHPSCKVTAMKCFLLELQVISLES | 73 |
| N-terminal signal | GDASIHDTVENLIILANNSLSSNGNVTESGCKECEELEEKNIKEFLQSFVHIVQ | |
| sequence) | MFINTSSGGGSGGGGSGGGGSGGGGSGGGSLQITCPPPMSVEHADIWVKSYSLY | |
| (exemplary amino | SRERYICNSGFKRKAGTSSLTECVLNKATNVAHWTTPSLKCIRDPALVHQRPAP | |
| acid sequence) | PSTVTTAGVTPQPESLSPSGKEPAASSPSSNNTAATTAAIVPGSQLMPSKSPST | |
| | GTTEISSHESSHGTPSQTTAKNWELTASASHQPPGVYPQGHSDTTVAISTSTVL | |
| | LCGLSAVSLLACYLKSRQTPPLASVEMEAMEALPVTWGTSSRDEDLENCSHHL | |
| mbIL15 (without | AACTGGGTGAATGTGATCAGCGACCTGAAGAAGATCGAGGATCTGATCCAGAGC | 74 |
| N-terminal signal | ATGCACATTGATGCCACCCTGTACACAGAATCTGATGTGCACCCTAGCTGTAAA | |
| sequence) | GTGACCGCCATGAAGTGTTTTCTGCTGGAGCTGCAGGTGATTTCTCTGGAAAGC | |
| (exemplary | GGAGATGCCTCTATCCACGACACAGTGGAGAATCTGATCATCCTGGCCAACAAT | |
| nucleotide | AGCCTGAGCAGCAATGGCAATGTGACAGAGTCTGGCTGTAAGGAGTGTGAGGAG | |
| sequence) | CTGGAGGAGAAGAACATCAAGGAGTTTCTGCAGAGCTTTGTGCACATCGTGCAG | |
| | ATGTTCATCAATACAAGCTCTGGCGGAGGATCTGGAGGAGGCGGATCTGGAGGA | |
| | GGAGGCAGTGGAGGCGGAGGATCTGGCGGAGGATCTCTGCAGATTACATGCCCT | |
| | CCTCCAATGTCTGTGGAGCACGCCGATATTTGGGTGAAGTCCTACAGCCTGTAC | |
| | AGCAGAGAGAGATACATCTGCAACAGCGGCTTTAAGAGAAAGGCCGGCACCTCT | |
| | TCTCTGACAGAGTGCGTGCTGAATAAGGCCACAAATGTGGCCCACTGGACAACA | |
| | CCTAGCCTGAAGTGCATTAGAGATCCTGCCCTGGTCCACCAGAGGCCTGCCCCT | |
| | CCATCTACAGTGACAACAGCCGGAGTGACACCTCAGCCTGAATCTCTGAGCCCT | |
| | TCTGGAAAAGAACCTGCCGCCAGCTCTCCTAGCTCTAATAATACCGCCGCCACA | |
| | ACAGCCGCCATTGTGCCTGGATCTCAGCTGATGCCTAGCAAGTCTCCTAGCACA | |
| | GGCACAACAGAGATCAGCAGCCACGAATCTTCTCACGGAACACCTTCTCAGACC | |
| | ACCGCCAAGAATTGGGAGCTGACAGCCTCTGCCTCTCACCAGCCTCCAGGAGTG | |
| | TATCCTCAGGGCCACTCTGATACAACAGTGGCCATCAGCACATCTACAGTGCTG | |
| | CTGTGTGGACTGTCTGCCGTGTCTCTGCTGGCCTGTTACCTGAAGTCTAGACAG | |
| | ACACCTCCTCTGGCCTCTGTGGAGATGGAGGCCATGGAAGCCCTGCCTGTGACA | |
| | TGGGGAACAAGCAGCAGAGATGAAGACCTGGAGAATTGTTCTCACCACCTG | |
| Soluble hIL-15 | NWVNVISDLKKIEDLIQSMHIDATLYTESDVHPSCKVTAMKCFLLELQVISLES | 76 |
| (exemplary amino | GDASIHDTVENLIILANNSLSSNGNVTESGCKECEELEEKNIKEFLQSFVHIVQ | |
| acid sequence) | MFINTS | |
| Soluble hIL-15 | AACTGGGTGAATGTGATCAGCGACCTGAAGAAGATCGAGGATCTGATCCAGAGC | 77 |
| (exemplary | ATGCACATTGATGCCACCCTGTACACAGAATCTGATGTGCACCCTAGCTGTAAA | |
| nucleotide | GTGACCGCCATGAAGTGTTTTCTGCTGGAGCTGCAGGTGATTTCTCTGGAAAGC | |
| sequence) | GGAGATGCCTCTATCCACGACACAGTGGAGAATCTGATCATCCTGGCCAACAAT | |
| | AGCCTGAGCAGCAATGGCAATGTGACAGAGTCTGGCTGTAAGGAGTGTGAGGAG | |
| | CTGGAGGAGAAGAACATCAAGGAGTTTCTGCAGAGCTTTGTGCACATCGTGCAG | |
| | ATGTTCATCAATACAAGC | |
| hIL-15Rα | ITCPPPMSVEHADIWVKSYSLYSRERYICNSGFKRKAGTSSLTECVLNKATNVA | 78 |
| (exemplary amino | HWTTPSLKCIRDPALVHQRPAPPSTVTTAGVTPQPESLSPSGKEPAASSPSSNN | |
| acid sequence) | TAATTAAIVPGSQLMPSKSPSTGTTEISSHESSHGTPSQTTAKNWELTASASHQ | |
| | PPGVYPQGHSDTTVAISTSTVLLCGLSAVSLLACYLKSRQTPPLASVEMEAMEA | |
| | LPVTWGTSSRDEDLENCSHHL | |
| hIL-15Rα | ATTACATGCCCTCCTCCAATGTCTGTGGAGCACGCCGATATTTGGGTGAAGTCC | 79 |
| (exemplary | TACAGCCTGTACAGCAGAGAGAGATACATCTGCAACAGCGGCTTTAAGAGAAAG | |
| nucleotide | GCCGGCACCTCTTCTCTGACAGAGTGCGTGCTGAATAAGGCCACAAATGTGGCC | |
| sequence) | CACTGGACAACACCTAGCCTGAAGTGCATTAGAGATCCTGCCCTGGTCCACCAG | |
| | AGGCCTGCCCCTCCATCTACAGTGACAACAGCCGGAGTGACACCTCAGCCTGAA | |
| | TCTCTGAGCCCTTCTGGAAAAGAACCTGCCGCCAGCTCTCCTAGCTCTAATAAT | |
| | ACCGCCGCCACAACAGCCGCCATTGTGCCTGGATCTCAGCTGATGCCTAGCAAG | |
| | TCTCCTAGCACAGGCACAACAGAGATCAGCAGCCACGAATCTTCTCACGGAACA | |
| | CCTTCTCAGACCACCGCCAAGAATTGGGAGCTGACAGCCTCTGCCTCTCACCAG | |
| | CCTCCAGGAGTGTATCCTCAGGGCCACTCTGATACAACAGTGGCCATCAGCACA | |
| | TCTACAGTGCTGCTGTGTGGACTGTCTGCCGTGTCTCTGCTGGCCTGTTACCTG | |
| | AAGTCTAGACAGACACCTCCTCTGGCCTCTGTGGAGATGGAGGCCATGGAAGCC | |
| | CTGCCTGTGACATGGGGAACAAGCAGCAGAGATGAAGACCTGGAGAATTGTTCT | |
| | CACCACCTG | |
| Linker | SGGGSGGGGSGGGGSGGGGSGGGSLQ | 81 |
| (exemplary amino | | |
| acid sequence) | | |
| Linker | TCTGGCGGAGGATCTGGAGGAGGCGGATCTGGAGGAGGAGGCAGTGGAGGCGGA | 82 |
| (exemplary | GGATCTGGCGGAGGATCTCTGCAG | |
| nucleotide | | |
| sequence) | | |
| IgE N-terminal | MDWTWILFLVAAATRVHS | 83 |
| signal sequence | | |
| (exemplary amino | | |
| acid sequence) | | |
| IgE N-terminal | ATGGATTGGACCTGGATTCTGTTTCTGGTGGCCGCTGCCACAAGAGTGCACAGC | 84 |
| signal sequence | | |
| (exemplary | | |
| nucleotide | | |
| sequence) | | |

### 1.4 Marker Proteins

[0263] The marker proteins described herein function to allow for the selective depletion of cells contacted with the recombinant vector disclosed herein (e.g., “recombinant cells”) in vivo, through the administration of an agent, e.g., an antibody, that specifically binds to the marker protein and may mediate or catalyze killing of a recombinant cell. In some embodiments, marker proteins are expressed on the surface of the recombinant cell.

[0264] In some embodiments, the marker protein comprises the extracellular domain of a cell surface protein, or a functional fragment or functional variant thereof. In some embodiments, the cell surface protein is human epidermal growth factor receptor 1 (hHER1). In some embodiments, the marker protein comprises a truncated HER1 protein that is able to be bound by an anti-hHER1 antibody. In some embodiments, the marker protein comprises a variant of a truncated hHER1 protein that is able to be bound by an anti-hHER1 antibody. In some embodiments, the hHER1 marker protein provides a safety mechanism by allowing for depletion of infused recombinant cells through administering an antibody that recognizes the hHER1 marker protein expressed on the surface of recombinant cells. An exemplary antibody that binds the hHER1 marker protein is cetuximab.

[0265] In some embodiments, the hHER1 marker protein comprises from N terminus to C terminus: domain III of hHER1, or a functional fragment or functional variant thereof; an N-terminal portion of domain IV of hHER1; and the transmembrane region of human CD28.

[0266] In some embodiments, domain III of hHER1 comprises the amino acid sequence of SEQ ID NO: 104; or the amino acid sequence of SEQ ID NO: 104, comprising 1, 2, or 3 amino acid modifications. In some embodiments, the amino acid sequence of domain III of hHER1 consists of the amino acid sequence of SEQ ID NO: 104; or the amino acid sequence of SEQ ID NO: 10, comprising 1, 2, or 3 amino acid modifications.

[0267] In some embodiments, the N-terminal portion of domain IV of hHER1 comprises amino acids 1-40, 1-39, 1-38, 1-37, 1-36, 1-35, 1-34, 1-33, 1-32, 1-31, 1-30, 1-29, 1-28, 1-27, 1-26, 1-25, 1-24, 1-23, 1-22, 1-21, 1-20, 1-19, 1-18, 1-17, 1-16, 1-15, 1-14, 1-13, 1-12, 1-11, or 1-10 of SEQ ID NO: 105. In some embodiments, the C terminus of domain III of hHER1 is directly fused to the N terminus of the N-terminal portion of domain IV of hHER1.

[0268] In some embodiments, the C terminus of the N-terminal portion of domain IV of hHER1 is indirectly fused to the N terminus of the CD28 transmembrane domain via a peptide linker. In some embodiments, the peptide linker comprises glycine and serine amino acid residues. In some embodiments, the peptide linker is from about 5-25, 5-20, 5-15, 5-10, 10-20, or 10-15 amino acids in length.

[0269] In some embodiments, the peptide linker comprises the amino acid sequence of SEQ ID NO: 108, or an amino acid sequence comprising 1, 2, 3, 4 or 5 amino acid modifications to the amino acid sequence of SEQ ID NO: 108. In some embodiments, the peptide linker comprises the amino acid sequence of SEQ ID NO: 108. In some embodiments, the amino acid sequence of the peptide linker consists of the amino acid sequence of SEQ ID NO: 108, or an amino acid sequence comprising 1, 2, 3, 4 or 5 amino acid modifications to the amino acid sequence of SEQ ID NO: 108. In some embodiments, the amino acid sequence of the peptide linker consists of the amino acid sequence of SEQ ID NO: 108.

[0270] In some embodiments, the marker protein comprises an amino acid sequence at least 95%, 96%, 97%, 98%, 99% or 100% identical to the amino acid sequence of SEQ ID NO: 100, 103, 112, or 113. In some embodiments, the marker protein comprises an amino acid sequence at least 95%, 96%, 97%, 98%, 99% or 100% identical to the amino acid sequence of SEQ ID NO: 100. In some embodiments, the marker protein comprises an amino acid sequence at least 95%, 96%, 97%, 98%, 99% or 100% identical to the amino acid sequence of SEQ ID NO: 103. In some embodiments, the marker protein comprises an amino acid sequence at least 95%, 96%, 97%, 98%, 99% or 100% identical to the amino acid sequence of SEQ ID NO: 112. In some embodiments, the marker protein comprises an amino acid sequence at least 95%, 96%, 97%, 98%, 99% or 100% identical to the amino acid sequence of SEQ ID NO: 113.

[0271] In some embodiments, the marker protein comprises the amino acid sequence of SEQ ID NO: 100 or 103. In some embodiments, the marker protein comprises the amino acid sequence of SEQ ID NO: 100. In some embodiments, the marker protein comprises the amino acid sequence of SEQ ID NO: 103.

[0272] In some embodiments, the marker protein consists of an amino acid sequence at least 95%, 96%, 97%, 98%, 99% or 100% identical to the amino acid sequence of SEQ ID NO: 100, 103, 112, or 113. In some embodiments, the marker protein consists of an amino acid sequence at least 95%, 96%, 97%, 98%, 99% or 100% identical to the amino acid sequence of SEQ ID NO: 100. In some embodiments, the marker protein consists of an amino acid sequence at least 95%, 96%, 97%, 98%, 99% or 100% identical to the amino acid sequence of SEQ ID NO: 103. In some embodiments, the marker protein consists of an amino acid sequence at least 95%, 96%, 97%, 98%, 99% or 100% identical to the amino acid sequence of SEQ ID NO: 112. In some embodiments, the marker protein consists of an amino acid sequence at least 95%, 96%, 97%, 98%, 99% or 100% identical to the amino acid sequence of SEQ ID NO: 113.

[0273] In some embodiments, the marker protein consists of the amino acid sequence of SEQ ID NO: 100, 103, 112, or 113. In some embodiments, the marker protein consists of the amino acid sequence of SEQ ID NO: 100. In some embodiments, the marker protein consists of the amino acid sequence of SEQ ID NO: 103. In some embodiments, the marker protein consists of the amino acid sequence of SEQ ID NO: 112. In some embodiments, the marker protein consists of the amino acid sequence of SEQ ID NO: 113.

[0274] In some embodiments, the marker protein is derived from human CD20 (hCD20). In some embodiments, the marker protein comprises a truncated hCD20 protein that comprises the extracellular region (hCD20t), or a functional fragment or functional variant thereof. In some embodiments, the hCD20 marker protein provides a safety mechanism by allowing for depletion of infused recombinant cells through administering an antibody that recognizes the hCD20 marker protein expressed on the surface of recombinant cells. An exemplary antibody that binds the hCD20 marker protein is rituximab.

[0275] The amino acid sequences of exemplary marker proteins are provided in Table 8, herein.

TABLE 8
Amino acid sequences of exemplary marker proteins.

| Description | Amino Acid Sequence | SEQ ID NO |
|---|---|---|
| HER1t (with N-terminal | MRLPAQLLGLLMLWVPGSSGRKVCNGIGIGEFKDSLSINATNI | 100 |
| signal sequence) (exemplary | KHFKNCTSISGDLHILPVAFRGDSFTHTPPLDPQELDILKTVK | |
| amino acid sequence) | EITGFLLIQAWPENRTDLHAFENLEIIRGRTKQHGQFSLAVVS | |
| | LNITSLGLRSLKEISDGDVIISGNKNLCYANTINWKKLFGTSG | |
| | QKTKIISNRGFNSCKATGQVCHALCSPEGCWGPEPRDCVSGGG | |
| | GSGGGGSGGGGSGGGGSFWVLVVVGGVLACYSLLVTVAFIIFW | |
| | VRSKRS | |
| HER1t (without N-terminal | RKVCNGIGIGEFKDSLSINATNIKHFKNCTSISGDLHILPVAF | 103 |
| signal sequence) (exemplary | RGDSFTHTPPLDPQELDILKTVKEITGFLLIQAWPENRTDLHA | |
| amino acid sequence) | FENLEIIRGRTKQHGQFSLAVVSLNITSLGLRSLKEISDGDVI | |
| | ISGNKNLCYANTINWKKLFGTSGQKTKIISNRGFNSCKATGQV | |
| | CHALCSPEGCWGPEPRDCVSGGGGSGGGGSGGGGSGGGGSFWV | |
| | LVVVGGVLACYSLLVTVAFIIFWVRSKRS | |
| Domain III of hHER1 | RKVCNGIGIGEFKDSLSINATNIKHFKNCTSISGDLHILPVAF | 104 |
| (exemplary amino acid | RGDSFTHTPPLDPQELDILKTVKEITGFLLIQAWPENRTDLHA | |
| sequence) | FENLEIIRGRTKQHGQFSLAVVSLNITSLGLRSLKEISDGDVI | |
| | ISGNKNLCYANTINWKKLFGTSGQKTKIISNRGFNSCKATGQ | |
| Domain IV of hHER1 | VCHALCSPEGCWGPEPRDCVSCRNVSRGRECVDKCNLLEGEPR | 105 |
| (exemplary amino acid | EFVENSECIQCHPECLPQAMNITCTGRGPDNCIQCAHYIDGPH | |
| sequence) | CVKTCPAGVMGFNNTLVWKYADAGHVCHLCHPNCTYGCTGPGL | |
| | EGCPTNGPKIPS | |
| Truncated domain IV of | VCHALCSPEGCWGPEPRDCVS | 106 |
| hHER1 (exemplary amino | | |
| sequence) | | |
| CD28 transmembrane domain | FWVLVVVGGVLACYSLLVTVAFIIFWVRSKRS | 107 |
| (exemplary amino acid | | |
| sequence) | | |
| Linker (exemplary amino acid | GGGGSGGGGSGGGGSGGGGS | 108 |
| sequence) | | |
| Igκ N-terminal signal | MRLPAQLLGLLMLWVPGSSG | 109 |
| sequence (exemplary amino | | |
| acid sequence) | | |
| Igκ Variant 1 N-terminal | MRMRLPAQLLGLLMLWVPGSSG | 110 |
| signal sequence (exemplary | | |
| amino acid sequence) | | |
| Igκ Variant 2 N-terminal | PRMRLPAQLLGLLMLWVPGSSG | 111 |
| signal sequence (exemplary | | |
| amino acid sequence) | | |
| HER1t-2 (with N-terminal | MRLPAQLLGLLMLWVPGSSGRKVCNGIGIGEFKDSLSINATNI | 112 |
| signal sequence) (exemplary | KHFKNCTSISGDLHILPVAFRGDSFTHTPPLDPQELDILKTVK | |
| amino acid sequence) | EITGFLLIQAWPENRTDLHAFENLEIIRGRTKQHGQFSLAVVS | |
| | LNITSLGLRSLKEISDGDVIISGNKNLCYANTINWKKLFGTSG | |
| | QKTKIISNRGFNSCKATGQVCHALCSPEGCWGPEPRDCVSCRN | |
| | VSRGRECVDKCNLLEGEPREFVENSECIQCHPECLPQAMNITC | |
| | TGRGPDNCIQCAHYIDGPHCVKTCPAGVMGFNNTLVWKYADAG | |
| | HVCHLCHPNCTYGCTGPGLEGCPTNGPKIPSIATGMVGALLLL | |
| | LVVALGIGLFM | |
| HER1t-2 (without N-terminal | RKVCNGIGIGEFKDSLSINATNIKHFKNCTSISGDLHILPVAF | 113 |
| signal sequence) (exemplary | RGDSFTHTPPLDPQELDILKTVKEITGFLLIQAWPENRTDLHA | |
| amino acid sequence) | FENLEIIRGRTKQHGQFSLAVVSLNITSLGLRSLKEISDGDVI | |
| | ISGNKNLCYANTINWKKLFGTSGQKTKIISNRGFNSCKATGQV | |
| | CHALCSPEGCWGPEPRDCVSCRNVSRGRECVDKCNLLEGEPRE | |
| | FVENSECIQCHPECLPQAMNITCTGRGPDNCIQCAHYIDGPHC | |
| | VKTCPAGVMGFNNTLVWKYADAGHVCHLCHPNCTYGCTGPGLE | |
| | GCPTNGPKIPSIATGMVGALLLLLVVALGIGLFM | |
| hCD20 (full length) | MTTPRNSVNGTFPAEPMKGPIAMQSGPKPLFRRMSSLVGPTQS | 114 |
| (exemplary amino acid | FFMRESKTLGAVQIMNGLFHIALGGLLMIPAGIYAPICVTVWY | |
| sequence) | PLWGGIMYIISGSLLAATEKNSRKCLVKGKMIMNSLSLFAAIS | |
| | GMILSIMDILNIKISHFLKMESLNFIRAHTPYINIYNCEPANP | |
| | SEKNSPSTQYCYSIQSLFLGILSVMLIFAFFQELVIAGIVENE | |
| | WKRTCSRPKSNIVLLSAEEKKEQTIEIKEEVVGLTETSSQPKN | |
| | EEDIEIIPIQEEEEEETETNFPEPPQDQESSPIENDSSP | |
| hCD20t-1 (exemplary amino | MTTPRNSVNGTFPAEPMKGPIAMQSGPKPLFRRMSSLVGPTQS | 115 |
| acid sequence) | FFMRESKTLGAVQIMNGLFHIALGGLLMIPAGIYAPICVTVWY | |
| | PLWGGIMYIISGSLLAATEKNSRKCLVKGKMIMNSLSLFAAIS | |
| | GMILSIMDILNIKISHFLKMESLNFIRAHTPYINIYNCEPANP | |
| | SEKNSPSTQYCYSIQSLFLGILSVMLIFAFFQELVIAGIVENE | |
| | WKRTCSRPKSNIVLLSAEEKKEQTIEIKEEVVGLTETSSQPKN | |
| | EEDIE | |

### 1.5 Vectors

[0276] In one aspect, provided herein are T cells transduced by electroporation with recombinant vectors comprising a polycistronic expression cassette that comprises at least three cistrons. In some embodiments, the polycistronic expression cassette comprises at least 4, 5, or 6 cistrons. In some embodiments, the polycistronic expression cassette comprises 3 cistrons. In some embodiments, the polycistronic expression cassette comprises 4 cistrons. In some embodiments, the polycistronic expression cassette comprises 5 cistrons. In some embodiments, the polycistronic expression cassette comprises 6 cistrons.

[0277] In some embodiments, the vector is a non-viral vector. Exemplary non-viral vectors include, but are not limited to, plasmid DNA, transposons, episomal plasmids, minicircles, ministrings, and oligonucleotides (e.g., mRNA, naked DNA). In some embodiments, the polycistronic vector is a DNA plasmid vector.

[0278] In some embodiments, the vector is a viral vector. Viral vectors can be replication competent or replication incompetent. Viral vectors can be integrating or non-integrating. A number of viral based systems have been developed for gene transfer into mammalian cells, and a suitable viral vector can be selected by a person of ordinary skill in the art. Exemplary viral vectors include, but are not limited to, adenovirus vectors (e.g., adenovirus 5), adeno-associated virus (AAV) vectors (e.g., AAV2, 3, 5, 6, 8, 9), retrovirus vectors (MMSV, MSCV), lentivirus vectors (e.g., HIV-1, HIV-2), gammaretrovirus vectors, herpes virus vectors (e.g., HSV1, HSV2), alphavirus vectors (e.g., SFV, SIN, VEE, M1), flavivirus (e.g., Kunjin, West Nile, Dengue virus), rhabdovirus vectors (e.g., rabies virus, VSV), measles virus vector (e.g., MV-Edm), Newcastle disease virus vectors, poxvirus vectors (e.g., VV), measles virus, and picornavirus vectors (e.g., Coxsackievirus).

[0279] In some embodiments, the vector or polycistronic expression cassette comprises one or more additional elements. Additional elements include, but are not limited to, promoters, enhancers, polyadenylation (polyA) sequences, and selection genes.

[0280] In some embodiments, the vector comprises a polynucleotide sequence that encodes for a selectable marker that confers a specific trait on cells in which the selectable marker is expressed enabling artificial selection of those cells. Exemplary selectable markers include, but are not limited to, antibiotic resistance genes, e.g., resistance to kanamycin, ampicillin, or triclosan.

[0281] In some embodiments, the polycistronic expression cassette comprises a transcriptional regulatory element. Exemplary transcriptional regulatory elements include, but are not limited to promoters and enhancers. In some embodiments, the polycistronic expression cassette comprises a promoter sequence 5′ of the first 5′ cistron. In some embodiments, the promoter comprises a polynucleotide sequence at least 75%, 80%, 85%, 90%, 95%, 96%, 97%, 98%, 99%, or 100% identical to the polynucleotide sequence of SEQ ID NO: 150. In some embodiments, the promoter comprises the polynucleotide sequence of SEQ ID NO: 150. In some embodiments, the polynucleotide sequence of the promoter consists of a polynucleotide sequence at least 75%, 80%, 85%, 90%, 95%, 96%, 97%, 98%, 99%, or 100% identical to the polynucleotide sequence of SEQ ID NO: 150. In some embodiments, the polynucleotide sequence of the promoter consists of the polynucleotide sequence of SEQ ID NO: 150.

[0282] In some embodiments, the polycistronic expression cassette comprises a polyA sequence 3′ of the 3′ terminal cistron. In some embodiments, the polyA sequence comprises a polynucleotide sequence at least 75%, 80%, 85%, 90%, 95%, 96%, 97%, 98%, 99%, or 100% identical to the polynucleotide sequence of SEQ ID NO: 151. In some embodiments, the polyA sequence comprises the nucleic acid sequence of SEQ ID NO: 151. In some embodiments, the polyA sequence consists of a sequence at least 75%, 80%, 85%, 90%, 95%, 96%, 97%, 98%, 99%, or 100% identical to the polynucleotide sequence of SEQ ID NO: 151. In some embodiments, the polyA sequence consists of the nucleic acid sequence of SEQ ID NO: 151.

[0283] The polynucleotide sequence of exemplary promoters and polyA sequences are provided in Table 9, herein.

TABLE 9
sequences of exemplary promoters and polyA sequences.

| Description | Nucleic Acid Sequence | SEQ ID NO |
|---|---|---|
| hEF-1Rα Hybrid | GGATCTGCGATCGCTCCGGTGCCCGTCAGTGGGCAGAGCGCACATC | 150 |
| Promoter | GCCCACAGTCCCCGAGAAGTTGGGGGGAGGGGTCGGCAATTGAACC | |
| | GGTGCCTAGAGAAGGTGGCGCGGGGTAAACTGGGAAAGTGATGTCG | |
| | TGTACTGGCTCCGCCTTTTTCCCGAGGGTGGGGGAGAACCGTATAT | |
| | AAGTGCAGTAGTCGCCGTGAACGTTCTTTTTCGCAACGGGTTTGCC | |
| | GCCAGAACACAGCTGAAGCTTCGAGGGGCTCGCATCTCTCCTTCAC | |
| | GCGCCCGCCGCCCTACCTGAGGCCGCCATCCACGCCGGTTGAGTCG | |
| | CGTTCTGCCGCCTCCCGCCTGTGGTGCCTCCTGAACTGCGTCCGCC | |
| | GTCTAGGTAAGTTTAAAGCTCAGGTCGAGACCGGGCCTTTGTCCGG | |
| | CGCTCCCTTGGAGCCTACCTAGACTCAGCCGGCTCTCCACGCTTTG | |
| | CCTGACCCTGCTTGCTCAACTCTACGTCTTTGTTTCGTTTTCTGTT | |
| | CTGCGCCGTTACAGATCCAAGCTGTGACCGGCGCCTACCTGAGAT | |
| BGH polyA sequence | GATCTGCTGTGCCTTCTAGTTGCCAGCCATCTGTTGTTTGCCCCTC | 151 |
| | CCCCGTGCCTTCCTTGACCCTGGAAGGTGCCACTCCCACTGTCCTT | |
| | TCCTAATAAAATGAGGAAATTGCATCGCATTGTCTGAGTAGGTGTC | |
| | ATTCTATTCTGGGGGGTGGGGTGGGGCAGGACAGCAAGGGGGAGGA | |
| | TTGGGAAGACAATAGCAGGCATGCTGGGGATGCGGTGGGCTCTATG | |
| | G | |

[0284] In some embodiments, the polycistronic expression cassette comprises a polynucleotide sequence that encodes an amino acid sequence at least 90%, 95%, 96%, 97%, 98%, 99% or 100% identical to an amino acid sequence recited in Tables 10A-10C.

TABLE 10A
Exemplary amino acid sequences encoded by polycistronic expression cassettes.

| | | SEQ |
|---|---|---|
| Description | Sequence | ID NO: |
| Cα (murine, | XIQNPEPAVYQLKDPRSQDSTLCLFTDFDSQINVPKTMESGTFITDKXVLDM | 160 |
| degenerate)-fP2A | KAMDSKSNGAIAWSNQTSFTCQDIFKETNATYPSSDVPCDATLTEKSFETDM | |
| | NLNFQNLXVXXLRILLLKVAGFNLLMTLRLWSSRAKRSGSGATNFSLLKQAG | |
| | DVEENPGP | |
| | X at position 1 is Asn, Asp, His, or Tyr; | |
| | X at position 48 is Thr or Cys; | |
| | X at position 112 is Ser, Ala, Val, Leu, Ile, Pro, Phe, Met, or Trp; | |
| | X at position 114 is Met, Ala, Val, Leu, Ile, Pro, Phe, or Trp; | |
| | X at position 115 is Gly, Ala, Val, Leu, Ile, Pro, Phe, Met, or Trp | |
| Cβ (murine, | EDLRNVTPPKVSLFEPSKAEIANKQKATLVCLARGFFPDHVELSWWVNGKEV | 161 |
| degenerate)-fT2A- | HSGVXTDPQAYKESNYSYCLSSRLRVSATFWHNPRNHFRCQVQFHGLSEEDK | |
| mbIL15 | WPEGSPKPVTQNISAEAWGRADCGITSASYQQGVLSATILYEILLGKATLYA | |
| | VLVSTLVVMAMVKRKNSRAKRSGSGEGRGSLLTCGDVEENPGPMDWTWILFL | |
| | VAAATRVHSNWVNVISDLKKIEDLIQSMHIDATLYTESDVHPSCKVTAMKCF | |
| | LLELQVISLESGDASIHDTVENLIILANNSLSSNGNVTESGCKECEELEEKN | |
| | IKEFLQSFVHIVQMFINTSSGGGSGGGGSGGGGSGGGGSGGGSLQITCPPPM | |
| | SVEHADIWVKSYSLYSRERYICNSGFKRKAGTSSLTECVLNKATNVAHWTTP | |
| | SLKCIRDPALVHQRPAPPSTVTTAGVTPQPESLSPSGKEPAASSPSSNNTAA | |
| | TTAAIVPGSQLMPSKSPSTGTTEISSHESSHGTPSQTTAKNWELTASASHQP | |
| | PGVYPQGHSDTTVAISTSTVLLCGLSAVSLLACYLKSRQTPPLASVEMEAME | |
| | ALPVTWGTSSRDEDLENCSHHL | |
| | X at position 57 is Ser or Cys | |
| Cα (murine, | XIQNPEPAVYQLKDPRSQDSTLCLFTDFDSQINVPKTMESGTFITDKXVLDM | 162 |
| degenerate)-fT2A | KAMDSKSNGAIAWSNQTSFTCQDIFKETNATYPSSDVPCDATLTEKSFETDM | |
| | NLNFQNLXVXXLRILLLKVAGFNLLMTLRLWSSRAKRSGSGEGRGSLLTCGD | |
| | VEENPGP | |
| | X at position 1 is Asn, Asp, His, or Tyr; | |
| | X at position 48 is Thr or Cys; | |
| | X at position 112 is Ser, Ala, Val, Leu, Ile, Pro, Phe, Met, or Trp; | |
| | X at position 114 is Met, Ala, Val, Leu, Ile, Pro, Phe, or Trp; | |
| | X at position 115 is Gly, Ala, Val, Leu, Ile, Pro, Phe, Met, or Trp | |
| Cβ (murine, | EDLRNVTPPKVSLFEPSKAEIANKQKATLVCLARGFFPDHVELSWWVNGKEV | 163 |
| degenerate)-fP2A- | HSGVXTDPQAYKESNYSYCLSSRLRVSATFWHNPRNHFRCQVQFHGLSEEDK | |
| mbIL15 | WPEGSPKPVTQNISAEAWGRADCGITSASYQQGVLSATILYEILLGKATLYA | |
| | VLVSTLVVMAMVKRKNSRAKRSGSGATNFSLLKQAGDVEENPGPMDWTWILF | |
| | LVAAATRVHSNWVNVISDLKKIEDLIQSMHIDATLYTESDVHPSCKVTAMKC | |
| | FLLELQVISLESGDASIHDTVENLIILANNSLSSNGNVTESGCKECEELEEK | |
| | NIKEFLQSFVHIVQMFINTSSGGGSGGGGSGGGGSGGGGSGGGSLQITCPPP | |
| | MSVEHADIWVKSYSLYSRERYICNSGFKRKAGTSSLTECVLNKATNVAHWTT | |
| | PSLKCIRDPALVHQRPAPPSTVTTAGVTPQPESLSPSGKEPAASSPSSNNTA | |
| | ATTAAIVPGSQLMPSKSPSTGTTEISSHESSHGTPSQTTAKNWELTASASHQ | |
| | PPGVYPQGHSDTTVAISTSTVLLCGLSAVSLLACYLKSRQTPPLASVEMEAM | |
| | EALPVTWGTSSRDEDLENCSHHL | |
| | X at position 57 is Ser or Cys | |
| Cα (murine, | XIQNPEPAVYQLKDPRSQDSTLCLFTDFDSQINVPKTMESGTFITDKXVLDM | 164 |
| degenerate)-fP2A- | KAMDSKSNGAIAWSNQTSFTCQDIFKETNATYPSSDVPCDATLTEKSFETDM | |
| mbIL15-fT2A | NLNFQNLXVXXLRILLLKVAGFNLLMTLRLWSSRAKRSGSGATNFSLLKQAG | |
| | DVEENPGPMDWTWILFLVAAATRVHSNWVNVISDLKKIEDLIQSMHIDATLY | |
| | TESDVHPSCKVTAMKCFLLELQVISLESGDASIHDTVENLIILANNSLSSNG | |
| | NVTESGCKECEELEEKNIKEFLQSFVHIVQMFINTSSGGGSGGGGSGGGGSG | |
| | GGGSGGGSLQITCPPPMSVEHADIWVKSYSLYSRERYICNSGFKRKAGTSSL | |
| | TECVLNKATNVAHWTTPSLKCIRDPALVHQRPAPPSTVTTAGVTPQPESLSP | |
| | SGKEPAASSPSSNNTAATTAAIVPGSQLMPSKSPSTGTTEISSHESSHGTPS | |
| | QTTAKNWELTASASHQPPGVYPQGHSDTTVAISTSTVLLCGLSAVSLLACYL | |
| | KSRQTPPLASVEMEAMEALPVTWGTSSRDEDLENCSHHLRAKRSGSGEGRGS | |
| | LLTCGDVEENPGP | |
| | X at position 1 is Asn, Asp, His, or Tyr; | |
| | X at position 48 is Thr or Cys; | |
| | X at position 112 is Ser, Ala, Val, Leu, Ile, Pro, Phe, Met, or Trp; | |
| | X at position 114 is Met, Ala, Val, Leu, Ile, Pro, Phe, or Trp; | |
| | X at position 115 is Gly, Ala, Val, Leu, Ile, Pro, Phe, Met, or Trp | |
| Cα (murine, | XIQNPEPAVYQLKDPRSQDSTLCLFTDFDSQINVPKTMESGTFITDKXVLDM | 165 |
| degenerate)-fT2A- | KAMDSKSNGAIAWSNQTSFTCQDIFKETNATYPSSDVPCDATLTEKSFETDM | |
| mbIL15-fP2A | NLNFQNLXVXXLRILLLKVAGFNLLMTLRLWSSRAKRSGSGEGRGSLLTCGD | |
| | VEENPGPMDWTWILFLVAAATRVHSNWVNVISDLKKIEDLIQSMHIDATLYT | |
| | ESDVHPSCKVTAMKCFLLELQVISLESGDASIHDTVENLIILANNSLSSNGN | |
| | VTESGCKECEELEEKNIKEFLQSFVHIVQMFINTSSGGGSGGGGSGGGGSGG | |
| | GGSGGGSLQITCPPPMSVEHADIWVKSYSLYSRERYICNSGFKRKAGTSSLT | |
| | ECVLNKATNVAHWTTPSLKCIRDPALVHQRPAPPSTVTTAGVTPQPESLSPS | |
| | GKEPAASSPSSNNTAATTAAIVPGSQLMPSKSPSTGTTEISSHESSHGTPSQ | |
| | TTAKNWELTASASHQPPGVYPQGHSDTTVAISTSTVLLCGLSAVSLLACYLK | |
| | SRQTPPLASVEMEAMEALPVTWGTSSRDEDLENCSHHLRAKRSGSGATNFSL | |
| | LKQAGDVEENPGP | |
| | X at position 1 is Asn, Asp, His, or Tyr; | |
| | X at position 48 is Thr or Cys; | |
| | X at position 112 is Ser, Ala, Val, Leu, Ile, Pro, Phe, Met, or Trp; | |
| | X at position 114 is Met, Ala, Val, Leu, Ile, Pro, Phe, or Trp; | |
| | X at position 115 is Gly, Ala, Val, Leu, Ile, Pro, Phe, Met, or Trp | |
| Cβ (murine, | EDLRNVTPPKVSLFEPSKAEIANKQKATLVCLARGFFPDHVELSWWVNGKEV | 166 |
| degenerate)-fP2A | HSGVXTDPQAYKESNYSYCLSSRLRVSATFWHNPRNHFRCQVQFHGLSEEDK | |
| | WPEGSPKPVTQNISAEAWGRADCGITSASYQQGVLSATILYEILLGKATLYA | |
| | VLVSTLVVMAMVKRKNSRAKRSGSGATNFSLLKQAGDVEENPGP | |
| | X at position 57 is Ser or Cys | |
| Cα (murine, | XIQNPEPAVYQLKDPRSQDSTLCLFTDFDSQINVPKTMESGTFITDKXVLDM | 167 |
| degenerate)-fT2A- | KAMDSKSNGAIAWSNQTSFTCQDIFKETNATYPSSDVPCDATLTEKSFETDM | |
| mbIL15 | NLNFQNLXVXXLRILLLKVAGFNLLMTLRLWSSRAKRSGSGEGRGSLLTCGD | |
| | VEENPGPMDWTWILFLVAAATRVHSNWVNVISDLKKIEDLIQSMHIDATLYT | |
| | ESDVHPSCKVTAMKCFLLELQVISLESGDASIHDTVENLIILANNSLSSNGN | |
| | VTESGCKECEELEEKNIKEFLQSFVHIVQMFINTSSGGGSGGGGSGGGGSGG | |
| | GGSGGGSLQITCPPPMSVEHADIWVKSYSLYSRERYICNSGFKRKAGTSSLT | |
| | ECVLNKATNVAHWTTPSLKCIRDPALVHQRPAPPSTVTTAGVTPQPESLSPS | |
| | GKEPAASSPSSNNTAATTAAIVPGSQLMPSKSPSTGTTEISSHESSHGTPSQ | |
| | TTAKNWELTASASHQPPGVYPQGHSDTTVAISTSTVLLCGLSAVSLLACYLK | |
| | SRQTPPLASVEMEAMEALPVTWGTSSRDEDLENCSHHL | |
| | X at position 1 is Asn, Asp, His, or Tyr; | |
| | X at position 48 is Thr or Cys; | |
| | X at position 112 is Ser, Ala, Val, Leu, Ile, Pro, Phe, Met, or Trp; | |
| | X at position 114 is Met, Ala, Val, Leu, Ile, Pro, Phe, or Trp; | |
| | X at position 115 is Gly, Ala, Val, Leu, Ile, Pro, Phe, Met, or Trp | |
| Cβ (murine, | EDLRNVTPPKVSLFEPSKAEIANKQKATLVCLARGFFPDHVELSWWVNGKEV | 168 |
| degenerate)-fT2A | HSGVXTDPQAYKESNYSYCLSSRLRVSATFWHNPRNHFRCQVQFHGLSEEDK | |
| | WPEGSPKPVTQNISAEAWGRADCGITSASYQQGVLSATILYEILLGKATLYA | |
| | VLVSTLVVMAMVKRKNSRAKRSGSGEGRGSLLTCGDVEENPGP | |
| | X at position 57 is Ser or Cys | |
| Cα (murine, | XIQNPEPAVYQLKDPRSQDSTLCLFTDFDSQINVPKTMESGTFITDKXVLDM | 169 |
| degenerate)-fP2A- | KAMDSKSNGAIAWSNQTSFTCQDIFKETNATYPSSDVPCDATLTEKSFETDM | |
| mbIL15 | NLNFQNLXVXXLRILLLKVAGFNLLMTLRLWSSRAKRSGSGATNFSLLKQAG | |
| | DVEENPGPMDWTWILFLVAAATRVHSNWVNVISDLKKIEDLIQSMHIDATLY | |
| | TESDVHPSCKVTAMKCFLLELQVISLESGDASIHDTVENLIILANNSLSSNG | |
| | NVTESGCKECEELEEKNIKEFLQSFVHIVQMFINTSSGGGSGGGGSGGGGSG | |
| | GGGSGGGSLQITCPPPMSVEHADIWVKSYSLYSRERYICNSGFKRKAGTSSL | |
| | TECVLNKATNVAHWTTPSLKCIRDPALVHQRPAPPSTVTTAGVTPQPESLSP | |
| | SGKEPAASSPSSNNTAATTAAIVPGSQLMPSKSPSTGTTEISSHESSHGTPS | |
| | QTTAKNWELTASASHQPPGVYPQGHSDTTVAISTSTVLLCGLSAVSLLACYL | |
| | KSRQTPPLASVEMEAMEALPVTWGTSSRDEDLENCSHHL | |
| | X at position 1 is Asn, Asp, His, or Tyr; | |
| | X at position 48 is Thr or Cys; | |
| | X at position 112 is Ser, Ala, Val, Leu, Ile, Pro, Phe, Met, or Trp; | |
| | X at position 114 is Met, Ala, Val, Leu, Ile, Pro, Phe, or Trp; | |
| | X at position 115 is Gly, Ala, Val, Leu, Ile, Pro, Phe, Met, or Trp | |
| Cβ (murine, | EDLRNVTPPKVSLFEPSKAEIANKQKATLVCLARGFFPDHVELSWWVNGKEV | 170 |
| degenerate)-fP2A- | HSGVXTDPQAYKESNYSYCLSSRLRVSATFWHNPRNHFRCQVQFHGLSEEDK | |
| mbIL15-fT2A | WPEGSPKPVTQNISAEAWGRADCGITSASYQQGVLSATILYEILLGKATLYA | |
| | VLVSTLVVMAMVKRKNSRAKRSGSGATNFSLLKQAGDVEENPGPMDWTWILF | |
| | LVAAATRVHSNWVNVISDLKKIEDLIQSMHIDATLYTESDVHPSCKVTAMKC | |
| | FLLELQVISLESGDASIHDTVENLIILANNSLSSNGNVTESGCKECEELEEK | |
| | NIKEFLQSFVHIVQMFINTSSGGGSGGGGSGGGGSGGGGSGGGSLQITCPPP | |
| | MSVEHADIWVKSYSLYSRERYICNSGFKRKAGTSSLTECVLNKATNVAHWTT | |
| | PSLKCIRDPALVHQRPAPPSTVTTAGVTPQPESLSPSGKEPAASSPSSNNTA | |
| | ATTAAIVPGSQLMPSKSPSTGTTEISSHESSHGTPSQTTAKNWELTASASHQ | |
| | PPGVYPQGHSDTTVAISTSTVLLCGLSAVSLLACYLKSRQTPPLASVEMEAM | |
| | EALPVTWGTSSRDEDLENCSHHLRAKRSGSGEGRGSLLTCGDVEENPGP | |
| | X at position 57 is Ser or Cys | |
| Cβ (murine, | EDLRNVTPPKVSLFEPSKAEIANKQKATLVCLARGFFPDHVELSWWVNGKEV | 171 |
| degenerate)-fT2A- | HSGVXTDPQAYKESNYSYCLSSRLRVSATFWHNPRNHFRCQVQFHGLSEEDK | |
| mbIL15-fP2A | WPEGSPKPVTQNISAEAWGRADCGITSASYQQGVLSATILYEILLGKATLYA | |
| | VLVSTLVVMAMVKRKNSRAKRSGSGEGRGSLLTCGDVEENPGPMDWTWILFL | |
| | VAAATRVHSNWVNVISDLKKIEDLIQSMHIDATLYTESDVHPSCKVTAMKCF | |
| | LLELQVISLESGDASIHDTVENLIILANNSLSSNGNVTESGCKECEELEEKN | |
| | IKEFLQSFVHIVQMFINTSSGGGSGGGGSGGGGSGGGGSGGGSLQITCPPPM | |
| | SVEHADIWVKSYSLYSRERYICNSGFKRKAGTSSLTECVLNKATNVAHWTTP | |
| | SLKCIRDPALVHQRPAPPSTVTTAGVTPQPESLSPSGKEPAASSPSSNNTAA | |
| | TTAAIVPGSQLMPSKSPSTGTTEISSHESSHGTPSQTTAKNWELTASASHQP | |
| | PGVYPQGHSDTTVAISTSTVLLCGLSAVSLLACYLKSRQTPPLASVEMEAME | |
| | ALPVTWGTSSRDEDLENCSHHLRAKRSGSGATNFSLLKQAGDVEENPGP | |
| | X at position 57 is Ser or Cys | |
| mbIL15-fP2A | MDWTWILFLVAAATRVHSNWVNVISDLKKIEDLIQSMHIDATLYTESDVHPS | 172 |
| | CKVTAMKCFLLELQVISLESGDASIHDTVENLIILANNSLSSNGNVTESGCK | |
| | ECEELEEKNIKEFLQSFVHIVQMFINTSSGGGSGGGGSGGGGSGGGGSGGGS | |
| | LQITCPPPMSVEHADIWVKSYSLYSRERYICNSGFKRKAGTSSLTECVLNKA | |
| | TNVAHWTTPSLKCIRDPALVHQRPAPPSTVTTAGVTPQPESLSPSGKEPAAS | |
| | SPSSNNTAATTAAIVPGSQLMPSKSPSTGTTEISSHESSHGTPSQTTAKNWE | |
| | LTASASHQPPGVYPQGHSDTTVAISTSTVLLCGLSAVSLLACYLKSRQTPPL | |
| | ASVEMEAMEALPVTWGTSSRDEDLENCSHHLRAKRSGSGATNFSLLKQAGDV | |
| | EENPGP | |
| mbIL15-fT2A | MDWTWILFLVAAATRVHSNWVNVISDLKKIEDLIQSMHIDATLYTESDVHPS | 173 |
| | CKVTAMKCFLLELQVISLESGDASIHDTVENLIILANNSLSSNGNVTESGCK | |
| | ECEELEEKNIKEFLQSFVHIVQMFINTSSGGGSGGGGSGGGGSGGGGSGGGS | |
| | LQITCPPPMSVEHADIWVKSYSLYSRERYICNSGFKRKAGTSSLTECVLNKA | |
| | TNVAHWTTPSLKCIRDPALVHQRPAPPSTVTTAGVTPQPESLSPSGKEPAAS | |
| | SPSSNNTAATTAAIVPGSQLMPSKSPSTGTTEISSHESSHGTPSQTTAKNWE | |
| | LTASASHQPPGVYPQGHSDTTVAISTSTVLLCGLSAVSLLACYLKSRQTPPL | |
| | ASVEMEAMEALPVTWGTSSRDEDLENCSHHLRAKRSGSGEGRGSLLTCGDVE | |
| | ENPGP | |

TABLE 10B
Exemplary amino acid sequences encoded by polycistronic expression cassettes

| | | SEQ |
|---|---|---|
| Description | Sequence | ID NO: |
| Cα (murine, cysteine- | NIQNPEPAVYQLKDPRSQDSTLCLFTDFDSQINVPKTMESGTFITDKCVLDM | 180 |
| and LIV-substituted)- | KAMDSKSNGAIAWSNQTSFTCQDIFKETNATYPSSDVPCDATLTEKSFETDM | |
| fP2A | NLNFQNLLVIVLRILLLKVAGFNLLMTLRLWSSRAKRSGSGATNFSLLKQAG | |
| | DVEENPGP | |
| Cβ (murine, cysteine- | EDLRNVTPPKVSLFEPSKAEIANKQKATLVCLARGFFPDHVELSWWVNGKEV | 181 |
| substituted)-fT2A- | HSGVCTDPQAYKESNYSYCLSSRLRVSATFWHNPRNHFRCQVQFHGLSEEDK | |
| mbIL15 | WPEGSPKPVTQNISAEAWGRADCGITSASYQQGVLSATILYEILLGKATLYA | |
| | VLVSTLVVMAMVKRKNSRAKRSGSGEGRGSLLTCGDVEENPGPMDWTWILFL | |
| | VAAATRVHSNWVNVISDLKKIEDLIQSMHIDATLYTESDVHPSCKVTAMKCF | |
| | LLELQVISLESGDASIHDTVENLIILANNSLSSNGNVTESGCKECEELEEKN | |
| | IKEFLQSFVHIVQMFINTSSGGGSGGGGSGGGGSGGGGSGGGSLQITCPPPM | |
| | SVEHADIWVKSYSLYSRERYICNSGFKRKAGTSSLTECVLNKATNVAHWTTP | |
| | SLKCIRDPALVHQRPAPPSTVTTAGVTPQPESLSPSGKEPAASSPSSNNTAA | |
| | TTAAIVPGSQLMPSKSPSTGTTEISSHESSHGTPSQTTAKNWELTASASHQP | |
| | PGVYPQGHSDTTVAISTSTVLLCGLSAVSLLACYLKSRQTPPLASVEMEAME | |
| | ALPVTWGTSSRDEDLENCSHHL | |
| Cα (murine, cysteine- | NIQNPEPAVYQLKDPRSQDSTLCLFTDFDSQINVPKTMESGTFITDKCVLDM | 182 |
| and LIV-substituted)- | KAMDSKSNGAIAWSNQTSFTCQDIFKETNATYPSSDVPCDATLTEKSFETDM | |
| fT2A | NLNFQNLLVIVLRILLLKVAGFNLLMTLRLWSSRAKRSGSGEGRGSLLTCGD | |
| | VEENPGP | |
| Cβ (murine, cysteine- | EDLRNVTPPKVSLFEPSKAEIANKQKATLVCLARGFFPDHVELSWWVNGKEV | 183 |
| substituted)-fP2A- | HSGVCTDPQAYKESNYSYCLSSRLRVSATFWHNPRNHFRCQVQFHGLSEEDK | |
| mbIL15 | WPEGSPKPVTQNISAEAWGRADCGITSASYQQGVLSATILYEILLGKATLYA | |
| | VLVSTLVVMAMVKRKNSRAKRSGSGATNFSLLKQAGDVEENPGPMDWTWILF | |
| | LVAAATRVHSNWVNVISDLKKIEDLIQSMHIDATLYTESDVHPSCKVTAMKC | |
| | FLLELQVISLESGDASIHDTVENLIILANNSLSSNGNVTESGCKECEELEEK | |
| | NIKEFLQSFVHIVQMFINTSSGGGSGGGGSGGGGSGGGGSGGGSLQITCPPP | |
| | MSVEHADIWVKSYSLYSRERYICNSGFKRKAGTSSLTECVLNKATNVAHWTT | |
| | PSLKCIRDPALVHQRPAPPSTVTTAGVTPQPESLSPSGKEPAASSPSSNNTA | |
| | ATTAAIVPGSQLMPSKSPSTGTTEISSHESSHGTPSQTTAKNWELTASASHQ | |
| | PPGVYPQGHSDTTVAISTSTVLLCGLSAVSLLACYLKSRQTPPLASVEMEAM | |
| | EALPVTWGTSSRDEDLENCSHHL | |
| Cα (murine, cysteine- | NIQNPEPAVYQLKDPRSQDSTLCLFTDFDSQINVPKTMESGTFITDKCVLDM | 184 |
| and LIV-substituted)- | KAMDSKSNGAIAWSNQTSFTCQDIFKETNATYPSSDVPCDATLTEKSFETDM | |
| fP2A-mbIL15-fT2A | NLNFQNLLVIVLRILLLKVAGFNLLMTLRLWSSRAKRSGSGATNFSLLKQAG | |
| | DVEENPGPMDWTWILFLVAAATRVHSNWVNVISDLKKIEDLIQSMHIDATLY | |
| | TESDVHPSCKVTAMKCFLLELQVISLESGDASIHDTVENLIILANNSLSSNG | |
| | NVTESGCKECEELEEKNIKEFLQSGVHIVQMFINTSSGGGSGGGGSGGGGSG | |
| | GGGSGGGSLQITCPPPMSVEHADIWVKSYSLYSRERYICNSGFKRKAGTSSL | |
| | TECVLNKATNVAHWTTPSLKCIRDPALVHQRPAPPSTVTTAGVTPQPESLSP | |
| | SGKEPAASSPSSNNTAATTAAIVPGSQLMPSKSPSTGTTEISSHESSHGTPS | |
| | QTTAKNWELTASASHQPPGVYPQGHSDTTVAISTSTVLLCGLSAVSLLACYL | |
| | KSRQTPPLASVEMEAMEALPVTWGTSSRDEDLENCSHHLRAKRSGSGEGRGS | |
| | LLTCGDVEENPGP | |
| Cα (murine, cysteine- | NIQNPEPAVYQLKDPRSQDSTLCLFTDFDSQINVPKTMESGTFITDKCVLDM | 185 |
| and LIV-substituted)- | KAMDSKSNGAIAWSNQTSFTCQDIFKETNATYPSSDVPCDATLTEKSFETDM | |
| fT2A-mbIL15-fP2A | NLNFQNLLVIVLRILLLKVAGFNLLMTLRLWSSRAKRSGSGEGRGSLLTCGD | |
| | VEENPGPMDWTWILFLVAAATRVHSNWVNVISDLKKIEDLIQSMHIDATLYT | |
| | ESDVHPSCKVTAMKCFLLELQVISLESGDASIHDTVENLIILANNSLSSNGN | |
| | VTESGCKECEELEEKNIKEFLQSFVHIVQMFINTSSGGGSGGGGSGGGGSGG | |
| | GGSGGGSLQITCPPPMSVEHADIWVKSYSLYSRERYICNSGFKRKAGTSSLT | |
| | ECVLNKATNVAHWTTPSLKCIRDPALVHQRPAPPSTVTTAGVTPQPESLSPS | |
| | GKEPAASSPSSNNTAATTAAIVPGSQLMPSKSPSTGTTEISSHESSHGTPSQ | |
| | TTAKNWELTASASHQPPGVYPQGHSDTTVAISTSTVLLCGLSAVSLLACYLK | |
| | SRQTPPLASVEMEAMEALPVTWGTSSRDEDLENCSHHLRAKRSGSGATNFSL | |
| | LKQAGDVEENPGP | |
| Cβ (murine, cysteine- | EDLRNVTPPKVSLFEPSKAEIANKQKATLVCLARGFFPDHVELSWWVNGKEV | 186 |
| substituted)-fP2A | HSGVCTDPQAYKESNYSYCLSSRLRVSATFWHNPRNHFRCQVQFHGLSEEDK | |
| | WPEGSPKPVTQNISAEAWGRADCGITSASYQQGVLSATILYEILLGKATLYA | |
| | VLVSTLVVMAMVKRKNSRAKRSGSGATNFSLLKQAGDVEENPGP | |
| Cα (murine, cysteine- | NIQNPEPAVYQLKDPRSQDSTLCLFTDFDSQINVPKTMESGTFITDKCVLDM | 187 |
| and LIV-substituted)- | KAMDSKSNGAIAWSNQTSFTCQDIFKETNATYPSSDVPCDATLTEKSFETDM | |
| fT2A-mbIL15 | NLNFQNLLVIVLRILLLKVAGFNLLMTLRLWSSRAKRSGSGEGRGSLLTCGD | |
| | VEENPGPMDWTWILFLVAAATRVHSNWVNVISDLKKIEDLIQSMHIDATLYT | |
| | ESDVHPSCKVTAMKCFLLELQVISLESGDASIHDTVENLIILANNSLSSNGN | |
| | VTESGCKECEELEEKNIKEFLQSFVHIVQMFINTSSGGGSGGGGSGGGGSGG | |
| | GGSGGGSLQITCPPPMSVEHADIWVKSYSLYSRERYICNSGFKRKAGTSSLT | |
| | ECVLNKATNVAHWTTPSLKCIRDPALVHQRPAPPSTVTTAGVTPQPESLSPS | |
| | GKEPAASSPSSNNTAATTAAIVPGSQLMPSKSPSTGTTEISSHESSHGTPSQ | |
| | TTAKNWELTASASHQPPGVYPQGHSDTTVAISTSTVLLCGLSAVSLLACYLK | |
| | SRQTPPLASVEMEAMEALPVTWGTSSRDEDLENCSHHL | |
| Cβ (murine, cysteine- | EDLRNVTPPKVSLFEPSKAEIANKQKATLVCLARGFFPDHVELSWWVNGKEV | 188 |
| substituted)-fT2A | HSGVCTDPQAYKESNYSYCLSSRLRVSATFWHNPRNHFRCQVQFHGLSEEDK | |
| | WPEGSPKPVTQNISAEAWGRADCGITSASYQQGVLSATILYEILLGKATLYA | |
| | VLVSTLVVMAMVKRKNSRAKRSGSGEGRGSLLTCGDVEENPGP | |
| Cα (murine, cysteine- | NIQNPEPAVYQLKDPRSQDSTLCLFTDFDSQINVPKTMESGTFITDKCVLDM | 189 |
| and LIV-substituted)- | KAMDSKSNGAIAWSNQTSFTCQDIFKETNATYPSSDVPCDATLTEKSFETDM | |
| fP2A-mbIL15 | NLNFQNLLVIVLRILLLKVAGFNLLMTLRLWSSRAKRSGSGATNFSLLKQAG | |
| | DVEENPGPMDWTWILFLVAAATRVHSNWVNVISDLKKIEDLIQSMHIDATLY | |
| | TESDVHPSCKVTAMKCFLLELQVISLESGDASIHDTVENLIILANNSLSSNG | |
| | NVTESGCKECEELEEKNIKEFLQSGVHIVQMFINTSSGGGSGGGGSGGGGSG | |
| | GGGSGGGSLQITCPPPMSVEHADIWVKSYSLYSRERYICNSGFKRKAGTSSL | |
| | TECVLNKATNVAHWTTPSLKCIRDPALVHQRPAPPSTVTTAGVTPQPESLSP | |
| | SGKEPAASSPSSNNTAATTAAIVPGSQLMPSKSPSTGTTEISSHESSHGTPS | |
| | QTTAKNWELTASASHQPPGVYPQGHSDTTVAISTSTVLLCGLSAVSLLACYL | |
| | KSRQTPPLASVEMEAMEALPVTWGTSSRDEDLENCSHHL | |
| Cβ (murine, cysteine- | EDLRNVTPPKVSLFEPSKAEIANKQKATLVCLARGFFPDHVELSWWVNGKEV | 190 |
| substituted)-fP2A- | HSGVCTDPQAYKESNYSYCLSSRLRVSATFWHNPRNHFRCQVQFHGLSEEDK | |
| mbIL15-fT2A | WPEGSPKPVTQNISAEAWGRADCGITSASYQQGVLSATILYEILLGKATLYA | |
| | VLVSTLVVMAMVKRKNSRAKRSGSGATNFSLLKQAGDVEENPGPMDWTWILF | |
| | LVAAATRVHSNWVNVISDLKKIEDLIQSMHIDATLYTESDVHPSCKVTAMKC | |
| | FLLELQVISLESGDASIHDTVENLIILANNSLSSNGNVTESGCKECEELEEK | |
| | NIKEFLQSFVHIVQMFINTSSGGGSGGGGSGGGGSGGGGSGGGSLQITCPPP | |
| | MSVEHADIWVKSYSLYSRERYICNSGFKRKAGTSSLTECVLNKATNVAHWTT | |
| | PSLKCIRDPALVHQRPAPPSTVTTAGVTPQPESLSPSGKEPAASSPSSNNTA | |
| | ATTAAIVPGSQLMPSKSPSTGTTEISSHESSHGTPSQTTAKNWELTASASHQ | |
| | PPGVYPQGHSDTTVAISTSTVLLCGLSAVSLLACYLKSRQTPPLASVEMEAM | |
| | EALPVTWGTSSRDEDLENCSHHLRAKRSGSGEGRGSLLTCGDVEENPGP | |
| Cβ (murine, cysteine- | EDLRNVTPPKVSLFEPSKAEIANKQKATLVCLARGFFPDHVELSWWVNGKEV | 191 |
| substituted)-fT2A- | HSGVCTDPQAYKESNYSYCLSSRLRVSATFWHNPRNHFRCQVQFHGLSEEDK | |
| mbIL15-fP2A | WPEGSPKPVTQNISAEAWGRADCGITSASYQQGVLSATILYEILLGKATLYA | |
| | VLVSTLVVMAMVKRKNSRAKRSGSGEGRGSLLTCGDVEENPGPMDWTWILFL | |
| | VAAATRVHSNWVNVISDLKKIEDLIQSMHIDATLYTESDVHPSCKVTAMKCF | |
| | LLELQVISLESGDASIHDTVENLIILANNSLSSNGNVTESGCKECEELEEKN | |
| | IKEFLQSFVHIVQMFINTSSGGGSGGGGSGGGGSGGGGSGGGSLQITCPPPM | |
| | SVEHADIWVKSYSLYSRERYICNSGFKRKAGTSSLTECVLNKATNVAHWTTP | |
| | SLKCIRDPALVHQRPAPPSTVTTAGVTPQPESLSPSGKEPAASSPSSNNTAA | |
| | TTAAIVPGSQLMPSKSPSTGTTEISSHESSHGTPSQTTAKNWELTASASHQP | |
| | PGVYPQGHSDTTVAISTSTVLLCGLSAVSLLACYLKSRQTPPLASVEMEAME | |
| | ALPVTWGTSSRDEDLENCSHHLRAKRSGSGATNFSLLKQAGDVEENPGP | |

TABLE 10C
Exemplary amino acid sequences encoded by polycistronic expression cassettes

| | | SEQ |
|---|---|---|
| Description | Sequence | ID NO: |
| Cα (murine, LIV | NIQNPEPAVYQLKDPRSQDSTLCLFTDFDSQINVPKTMESGTFITDKTVLDM | 210 |
| substituted)-fP2A | KAMDSKSNGAIAWSNQTSFTCQDIFKETNATYPSSDVPCDATLTEKSFETDM | |
| | NLNFQNLLVIVLRILLLKVAGFNLLMTLRLWSSRAKRSGSGATNFSLLKQAG | |
| | DVEENPGP | |
| Cα (murine, LIV | NIQNPEPAVYQLKDPRSQDSTLCLFTDFDSQINVPKTMESGTFITDKTVLDM | 212 |
| substituted)-fT2A | KAMDSKSNGAIAWSNQTSFTCQDIFKETNATYPSSDVPCDATLTEKSFETDM | |
| | NLNFQNLLVIVLRILLLKVAGFNLLMTLRLWSSRAKRSGSGEGRGSLLTCGD | |
| | VEENPGP | |
| Cα (murine, LIV | NIQNPEPAVYQLKDPRSQDSTLCLFTDFDSQINVPKTMESGTFITDKTVLDM | 214 |
| substituted)-fP2A- | KAMDSKSNGAIAWSNQTSFTCQDIFKETNATYPSSDVPCDATLTEKSFETDM | |
| mbIL15-fT2A | NLNFQNLLVIVLRILLLKVAGFNLLMTLRLWSSRAKRSGSGATNFSLLKQAG | |
| | DVEENPGPMDWTWILFLVAAATRVHSNWVNVISDLKKIEDLIQSMHIDATLY | |
| | TESDVHPSCKVTAMKCFLLELQVISLESGDASIHDTVENLIILANNSLSSNG | |
| | NVTESGCKECEELEEKNIKEFLQSFVHIVQMFINTSSGGGSGGGGSGGGGSG | |
| | GGGSGGGSLQITCPPPMSVEHADIWVKSYSLYSRERYICNSGFKRKAGTSSL | |
| | TECVLNKATNVAHWTTPSLKCIRDPALVHQRPAPPSTVTTAGVTPQPESLSP | |
| | SGKEPAASSPSSNNTAATTAAIVPGSQLMPSKSPSTGTTEISSHESSHGTPS | |
| | QTTAKNWELTASASHQPPGVYPQGHSDTTVAISTSTVLLCGLSAVSLLACYL | |
| | KSRQTPPLASVEMEAMEALPVTWGTSSRDEDLENCSHHLRAKRSGSGEGRGS | |
| | LLTCGDVEENPGP | |
| Cα (murine, LIV | NIQNPEPAVYQLKDPRSQDSTLCLFTDFDSQINVPKTMESGTFITDKTVLDM | 215 |
| substituted)-fT2A- | KAMDSKSNGAIAWSNQTSFTCQDIFKETNATYPSSDVPCDATLTEKSFETDM | |
| mbIL15-fP2A | NLNFQNLLVIVLRILLLKVAGFNLLMTLRLWSSRAKRSGSGEGRGSLLTCGD | |
| | VEENPGPMDWTWILFLVAAATRVHSNWVNVISDLKKIEDLIQSMHIDATLYT | |
| | ESDVHPSCKVTAMKCFLLELQVISLESGDASIHDTVENLIILANNSLSSNGN | |
| | VTESGCKECEELEEKNIKEFLQSFVHIVQMFINTSSGGGSGGGGSGGGGSGG | |
| | GGSGGGSLQITCPPPMSVEHADIWVKSYSLYSRERYICNSGFKRKAGTSSLT | |
| | ECVLNKATNVAHWTTPSLKCIRDPALVHQRPAPPSTVTTAGVTPQPESLSPS | |
| | GKEPAASSPSSNNTAATTAAIVPGSQLMPSKSPSTGTTEISSHESSHGTPSQ | |
| | TTAKNWELTASASHQPPGVYPQGHSDTTVAISTSTVLLCGLSAVSLLACYLK | |
| | SRQTPPLASVEMEAMEALPVTWGTSSRDEDLENCSHHLRAKRSGSGATNFSL | |
| | LKQAGDVEENPGP | |
| Cα (murine, LIV | NIQNPEPAVYQLKDPRSQDSTLCLFTDFDSQINVPKTMESGTFITDKTVLDM | 217 |
| substituted)-fT2A- | KAMDSKSNGAIAWSNQTSFTCQDIFKETNATYPSSDVPCDATLTEKSFETDM | |
| mbIL15 | NLNFQNLLVIVLRILLLKVAGFNLLMTLRLWSSRAKRSGSGEGRGSLLTCGD | |
| | VEENPGPMDWTWILFLVAAATRVHSNWVNVISDLKKIEDLIQSMHIDATLYT | |
| | ESDVHPSCKVTAMKCFLLELQVISLESGDASIHDTVENLIILANNSLSSNGN | |
| | VTESGCKECEELEEKNIKEFLQSFVHIVQMFINTSSGGGSGGGGSGGGGSGG | |
| | GGSGGGSLQITCPPPMSVEHADIWVKSYSLYSRERYICNSGFKRKAGTSSLT | |
| | ECVLNKATNVAHWTTPSLKCIRDPALVHQRPAPPSTVTTAGVTPQPESLSPS | |
| | GKEPAASSPSSNNTAATTAAIVPGSQLMPSKSPSTGTTEISSHESSHGTPSQ | |
| | TTAKNWELTASASHQPPGVYPQGHSDTTVAISTSTVLLCGLSAVSLLACYLK | |
| | SRQTPPLASVEMEAMEALPVTWGTSSRDEDLENCSHHL | |
| Cα (murine, LIV | NIQNPEPAVYQLKDPRSQDSTLCLFTDFDSQINVPKTMESGTFITDKTVLDM | 219 |
| substituted)-fP2A- | KAMDSKSNGAIAWSNQTSFTCQDIFKETNATYPSSDVPCDATLTEKSFETDM | |
| mbIL15 | NLNFQNLLVIVLRILLLKVAGFNLLMTLRLWSSRAKRSGSGATNFSLLKQAG | |
| | DVEENPGPMDWTWILFLVAAATRVHSNWVNVISDLKKIEDLIQSMHIDATLY | |
| | TESDVHPSCKVTAMKCFLLELQVISLESGDASIHDTVENLIILANNSLSSNG | |
| | NVTESGCKECEELEEKNIKEFLQSFVHIVQMFINTSSGGGSGGGGSGGGGSG | |
| | GGGSGGGSLQITCPPPMSVEHADIWVKSYSLYSRERYICNSGFKRKAGTSSL | |
| | TECVLNKATNVAHWTTPSLKCIRDPALVHQRPAPPSTVTTAGVTPQPESLSP | |
| | SGKEPAASSPSSNNTAATTAAIVPGSQLMPSKSPSTGTTEISSHESSHGTPS | |
| | QTTAKNWELTASASHQPPGVYPQGHSDTTVAISTSTVLLCGLSAVSLLACYL | |
| | KSRQTPPLASVEMEAMEALPVTWGTSSRDEDLENCSHHL | |

[0285] Tables 11A, B and C below provide exemplary polynucleotide sequences for use in constructing vectors that may be used in the present disclosure. As shown in Tables 11A, B and C, vectors of the present disclosure can include one or more of the following sequences: (1) an “AP” sequence which encodes (i) a Cα sequence disclosed herein and (ii) a P2A element sequence disclosed herein; (2) a “BT” sequence which encodes (i) a Cβ sequence disclosed herein and (ii) a T2A element sequence disclosed herein; (3) a “BT15” sequence which encodes (i) a Cβ sequence disclosed herein, (ii) a T2A element sequence disclosed herein, and (iii) a mbIL15 sequence disclosed herein; (4) an “AT” sequence which encodes (i) a Cα sequence disclosed herein and (ii) a T2A element sequence disclosed herein; (5) a “BP” sequence which encodes (i) a Cβ sequence disclosed herein and (ii) a P2A element sequence disclosed herein; (6) a “BP15” sequence which encodes (i) a Cβ sequence disclosed herein, (ii) a P2A element sequence disclosed herein, and (iii) a mbIL15 sequence disclosed herein; (7) an “A-P15” sequence which encodes (i) a Cα sequence disclosed herein, (ii) a P2A element sequence disclosed herein, and (iii) a mbIL15 sequence disclosed herein; (8) a “15T” sequence which encodes (i) a mbIL15 sequence disclosed herein and (ii) a T2A element sequence disclosed herein; (9) an “AP15T” sequence which encodes (i) a Cα sequence disclosed herein, (ii) a P2A element sequence disclosed herein, (iii) a mbIL15 sequence disclosed herein, and (iv) a T2A element sequence disclosed herein (10) an “AT15” sequence which encodes (i) a Cα sequence disclosed herein, (ii) a T2A element sequence disclosed herein, and (iii) a mbIL15 sequence disclosed herein; (11) a “15P” sequence which encodes (i) a mbIL15 sequence disclosed herein, and (ii) a P2A element sequence disclosed herein; (12) an “AT 15P” sequence which encodes (i) a Cα sequence disclosed herein, (ii) a T2A element sequence disclosed herein, (iii) a mbIL15 sequence disclosed herein, and (iv) a P2A element sequence disclosed herein; (13) an “BP15T” sequence which encodes (i) a Cβ sequence disclosed herein, (ii) a P2A element sequence disclosed herein, (iii) a mbIL15 sequence disclosed herein, and (iv) a T2A element sequence disclosed herein; (14) an “BT15P” sequence which encodes (i) a Cβ sequence disclosed herein, (ii) a T2A element sequence disclosed herein, (iii) a mbIL15 sequence disclosed herein, and (iv) a P2A element sequence disclosed herein.

[0286] The nucleotide sequences provided herein (and their corresponding amino acid sequences) may be used in any appropriate combination. An “appropriate combination” is a combination where desired molecular function(s) are provided by one or more of the sequences disclosed herein. For example, in general, any 2A element sequence provided herein can provide the function of ribosome skipping (via the 2A element) and, optionally, furin-mediated cleavage (via the furin recognition site). Thus, an “AT” sequence in a vector of the present disclosure could, in alternative embodiments, be replaced by an “AP” sequence of the present disclosure. Similarly, “AE” and “AF” sequences, comprising Cα region sequences and E2A or F2A element sequences can also be used. “BT,” “BP,” “BE,” and “BF” sequences comprising Cβ region sequences and 2A element sequences are all also interchangeable. “15T,” “15P,” “15E,” and “15F” sequences comprising mbIL15 sequences and 2A element sequences are all also interchangeable. Additionally, any combination of TCRα, TCRβ, and mbIL15 sequences may appear from 5′ to 3′ on a vector of the present disclosure in any order and may be separated by sequences which provide appropriate 2A element sequence function (e.g., ribosome skipping, furin cleavage).

[0287] Accordingly, sequences of the present disclosure provide ribosome skipping, furin recognition, TCRα function, TCRβ function, and mbIL15 function in any appropriate combination or 5′ to 3′ order.

TABLE 11A
Exemplary polynucleotide sequences for use in polycistronic expression cassettes.

| | | SEQ |
|---|---|---|
| Description | Sequence | ID NO: |
| AP nucleotide | NNNATCCAGAATCCCGAGCCTGCGGTGTACCAGCTGAAGGACCCCCGCTCT | 230 |
| sequence | CAGGATAGCACACTGTGCCTGTTCACCGACTTTGATAGCCAGATCAACGTG | |
| | CCTAAAACAATGGAGTCCGGCACCTTCATCACCGACAAGNNNGTGCTGGAT | |
| | ATGAAAGCGATGGACTCCAAGTCTAACGGCGCGATCGCGTGGTCCAATCAG | |
| | ACATCTTTCACCTGCCAGGATATCTTCAAGGAGACAAACGCGACCTATCCT | |
| | TCCTCTGACGTGCCATGTGATGCGACACTGACCGAGAAGAGCTTCGAGACA | |
| | GACATGAACCTGAATTTTCAGAATCTGNNNGTCNNNNNNCTGAGAATCCTG | |
| | CTGCTGAAGGTGGCGGGCTTTAATCTGCTGATGACACTGCGGCTGTGGAGT | |
| | TCCCGGGCGAAACGCTCTGGAAGCGGAGCGACCAATTTCAGCCTGCTGAAG | |
| | CAGGCGGGCGATGTGGAGGAGAACCCTGGCCCA | |
| | NNN at positions 1-3 make up a codon that encodes Asn, Asp, His, or Tyr; | |
| | NNN at positions 142-144 make up a codon that encodes Thr or Cys; | |
| | NNN at positions 334-336 make up a codon that encodes Ser, Ala, Val, Leu, | |
| | Ile, Pro, Phe, Met, or Trp; | |
| | NNN at positions 340-342 make up a codon that encodes Met, Ala, Val, Leu, | |
| | Ile, Pro, Phe, or Trp; | |
| | NNN at positions 343-345 make up a codon that encodes Gly, Ala, Val, Leu, | |
| | Ile, Pro, Phe, Met, or Trp | |
| BT nucleotide | GAGGACCTGAGGAACGTGACCCCACCTAAAGTGAGCCTGTTCGAGCCATCC | 231 |
| sequence | AAGGCGGAGATCGCGAATAAGCAGAAAGCGACCCTGGTGTGCCTGGCGAGG | |
| | GGCTTCTTTCCCGATCACGTGGAGCTGTCCTGGTGGGTGAACGGCAAAGAG | |
| | GTGCACTCTGGCGTGNNNACAGACCCTCAGGCGTACAAGGAGAGCAATTAC | |
| | TCCTATTGTCTGTCTAGCAGACTGAGGGTGAGCGCGACCTTTTGGCACAAC | |
| | CCCCGGAATCACTTCCGCTGCCAGGTGCAGTTTCACGGCCTGTCCGAGGAG | |
| | GATAAATGGCCTGAGGGCTCTCCAAAGCCCGTGACACAGAATATCAGCGCG | |
| | GAGGCGTGGGGAAGAGCGGACTGTGGCATTACAAGCGCGTCCTATCAGCAG | |
| | GGCGTGCTGTCCGCGACCATCCTGTACGAGATTCTGCTGGGCAAGGCGACA | |
| | CTGTATGCGGTGCTGGTGTCCACCCTGGTGGTCATGGCGATGGTGAAGAGG | |
| | AAAAACTCTCGGGCGAAACGCTCTGGAAGCGGAGAGGGCAGAGGAAGTCTT | |
| | CTAACATGCGGTGACGTGGAGGAGAATCCCGGCCCT | |
| | NNN at positions 169-171 make up a codon that encodes Ser or Cys | |
| BT15 nucleotide | GAGGACCTGAGGAACGTGACCCCACCTAAAGTGAGCCTGTTCGAGCCATCC | 232 |
| sequence | AAGGCGGAGATCGCGAATAAGCAGAAAGCGACCCTGGTGTGCCTGGCGAGG | |
| | GGCTTCTTTCCCGATCACGTGGAGCTGTCCTGGTGGGTGAACGGCAAAGAG | |
| | GTGCACTCTGGCGTGNNNACAGACCCTCAGGCGTACAAGGAGAGCAATTAC | |
| | TCCTATTGTCTGTCTAGCAGACTGAGGGTGAGCGCGACCTTTTGGCACAAC | |
| | CCCCGGAATCACTTCCGCTGCCAGGTGCAGTTTCACGGCCTGTCCGAGGAG | |
| | GATAAATGGCCTGAGGGCTCTCCAAAGCCCGTGACACAGAATATCAGCGCG | |
| | GAGGCGTGGGGAAGAGCGGACTGTGGCATTACAAGCGCGTCCTATCAGCAG | |
| | GGCGTGCTGTCCGCGACCATCCTGTACGAGATTCTGCTGGGCAAGGCGACA | |
| | CTGTATGCGGTGCTGGTGTCCACCCTGGTGGTCATGGCGATGGTGAAGAGG | |
| | AAAAACTCTCGGGCGAAACGCTCTGGAAGCGGAGAGGGCAGAGGAAGTCTT | |
| | CTAACATGCGGTGACGTGGAGGAGAATCCCGGCCCTATGGATTGGACCTGG | |
| | ATTCTGTTTCTGGTGGCCGCTGCCACAAGAGTGCACAGCAACTGGGTGAAT | |
| | GTGATCAGCGACCTGAAGAAGATCGAGGATCTGATCCAGAGCATGCACATT | |
| | GATGCCACCCTGTACACAGAATCTGATGTGCACCCTAGCTGTAAAGTGACC | |
| | GCCATGAAGTGTTTTCTGCTGGAGCTGCAGGTGATTTCTCTGGAAAGCGGA | |
| | GATGCCTCTATCCACGACACAGTGGAGAATCTGATCATCCTGGCCAACAAT | |
| | AGCCTGAGCAGCAATGGCAATGTGACAGAGTCTGGCTGTAAGGAGTGTGAG | |
| | GAGCTGGAGGAGAAGAACATCAAGGAGTTTCTGCAGAGCTTTGTGCACATC | |
| | GTGCAGATGTTCATCAATACAAGCTCTGGCGGAGGATCTGGAGGAGGCGGA | |
| | TCTGGAGGAGGAGGCAGTGGAGGCGGAGGATCTGGCGGAGGATCTCTGCAG | |
| | ATTACATGCCCTCCTCCAATGTCTGTGGAGCACGCCGATATTTGGGTGAAG | |
| | TCCTACAGCCTGTACAGCAGAGAGAGATACATCTGCAACAGCGGCTTTAAG | |
| | AGAAAGGCCGGCACCTCTTCTCTGACAGAGTGCGTGCTGAATAAGGCCACA | |
| | AATGTGGCCCACTGGACAACACCTAGCCTGAAGTGCATTAGAGATCCTGCC | |
| | CTGGTCCACCAGAGGCCTGCCCCTCCATCTACAGTGACAACAGCCGGAGTG | |
| | ACACCTCAGCCTGAATCTCTGAGCCCTTCTGGAAAAGAACCTGCCGCCAGC | |
| | TCTCCTAGCTCTAATAATACCGCCGCCACAACAGCCGCCATTGTGCCTGGA | |
| | TCTCAGCTGATGCCTAGCAAGTCTCCTAGCACAGGCACAACAGAGATCAGC | |
| | AGCCACGAATCTTCTCACGGAACACCTTCTCAGACCACCGCCAAGAATTGG | |
| | GAGCTGACAGCCTCTGCCTCTCACCAGCCTCCAGGAGTGTATCCTCAGGGC | |
| | CACTCTGATACAACAGTGGCCATCAGCACATCTACAGTGCTGCTGTGTGGA | |
| | CTGTCTGCCGTGTCTCTGCTGGCCTGTTACCTGAAGTCTAGACAGACACCT | |
| | CCTCTGGCCTCTGTGGAGATGGAGGCCATGGAAGCCCTGCCTGTGACATGG | |
| | GGAACAAGCAGCAGAGATGAAGACCTGGAGAATTGTTCTCACCACCTG | |
| | NNN at positions 169-171 make up a codon that encodes Ser or Cys | |
| AT nucleotide | NNNATCCAGAATCCCGAGCCTGCGGTGTACCAGCTGAAGGACCCCCGCTCT | 233 |
| sequence | CAGGATAGCACACTGTGCCTGTTCACCGACTTTGATAGCCAGATCAACGTG | |
| | CCTAAAACAATGGAGTCCGGCACCTTCATCACCGACAAGNNNGTGCTGGAT | |
| | ATGAAAGCGATGGACTCCAAGTCTAACGGCGCGATCGCGTGGTCCAATCAG | |
| | ACATCTTTCACCTGCCAGGATATCTTCAAGGAGACAAACGCGACCTATCCT | |
| | TCCTCTGACGTGCCATGTGATGCGACACTGACCGAGAAGAGCTTCGAGACA | |
| | GACATGAACCTGAATTTTCAGAATCTGNNNGTCNNNNNNCTGAGAATCCTG | |
| | CTGCTGAAGGTGGCGGGCTTTAATCTGCTGATGACACTGCGGCTGTGGAGT | |
| | TCCCGGGCGAAACGCTCTGGAAGCGGAGAGGGCAGAGGAAGTCTTCTAACA | |
| | TGCGGTGACGTGGAGGAGAATCCCGGCCCT | |
| | NNN at positions 1-3 make up a codon that encodes Asn, Asp, His, or Tyr; | |
| | NNN at positions 142-144 make up a codon that encodes Thr or Cys; | |
| | NNN at positions 334-336 make up a codon that encodes Ser, Ala, Val, Leu, | |
| | Ile, Pro, Phe, Met, or Trp; | |
| | NNN at positions 340-342 make up a codon that encodes Met, Ala, Val, Leu, | |
| | Ile, Pro, Phe, or Trp; | |
| | NNN at positions 343-345 make up a codon that encodes Gly, Ala, Val, Leu, | |
| | Ile, Pro, Phe, Met, or Trp | |
| BP nucleotide | GAGGACCTGAGGAACGTGACCCCACCTAAAGTGAGCCTGTTCGAGCCATCC | 234 |
| sequence | AAGGCGGAGATCGCGAATAAGCAGAAAGCGACCCTGGTGTGCCTGGCGAGG | |
| | GGCTTCTTTCCCGATCACGTGGAGCTGTCCTGGTGGGTGAACGGCAAAGAG | |
| | GTGCACTCTGGCGTGNNNACAGACCCTCAGGCGTACAAGGAGAGCAATTAC | |
| | TCCTATTGTCTGTCTAGCAGACTGAGGGTGAGCGCGACCTTTTGGCACAAC | |
| | CCCCGGAATCACTTCCGCTGCCAGGTGCAGTTTCACGGCCTGTCCGAGGAG | |
| | GATAAATGGCCTGAGGGCTCTCCAAAGCCCGTGACACAGAATATCAGCGCG | |
| | GAGGCGTGGGGAAGAGCGGACTGTGGCATTACAAGCGCGTCCTATCAGCAG | |
| | GGCGTGCTGTCCGCGACCATCCTGTACGAGATTCTGCTGGGCAAGGCGACA | |
| | CTGTATGCGGTGCTGGTGTCCACCCTGGTGGTCATGGCGATGGTGAAGAGG | |
| | AAAAACTCTCGGGCGAAACGCTCTGGAAGCGGAGCGACCAATTTCAGCCTG | |
| | CTGAAGCAGGCGGGCGATGTGGAGGAGAACCCTGGCCCA | |
| | NNN at positions 169-171 make up a codon that encodes Ser or Cys | |
| BP15 nucleotide | GAGGACCTGAGGAACGTGACCCCACCTAAAGTGAGCCTGTTCGAGCCATCC | 235 |
| sequence | AAGGCGGAGATCGCGAATAAGCAGAAAGCGACCCTGGTGTGCCTGGCGAGG | |
| | GGCTTCTTTCCCGATCACGTGGAGCTGTCCTGGTGGGTGAACGGCAAAGAG | |
| | GTGCACTCTGGCGTGNNNACAGACCCTCAGGCGTACAAGGAGAGCAATTAC | |
| | TCCTATTGTCTGTCTAGCAGACTGAGGGTGAGCGCGACCTTTTGGCACAAC | |
| | CCCCGGAATCACTTCCGCTGCCAGGTGCAGTTTCACGGCCTGTCCGAGGAG | |
| | GATAAATGGCCTGAGGGCTCTCCAAAGCCCGTGACACAGAATATCAGCGCG | |
| | GAGGCGTGGGGAAGAGCGGACTGTGGCATTACAAGCGCGTCCTATCAGCAG | |
| | GGCGTGCTGTCCGCGACCATCCTGTACGAGATTCTGCTGGGCAAGGCGACA | |
| | CTGTATGCGGTGCTGGTGTCCACCCTGGTGGTCATGGCGATGGTGAAGAGG | |
| | AAAAACTCTCGGGCGAAACGCTCTGGAAGCGGAGCGACCAATTTCAGCCTG | |
| | CTGAAGCAGGCGGGCGATGTGGAGGAGAACCCTGGCCCAATGGATTGGACC | |
| | TGGATTCTGTTTCTGGTGGCCGCTGCCACAAGAGTGCACAGCAACTGGGTG | |
| | AATGTGATCAGCGACCTGAAGAAGATCGAGGATCTGATCCAGAGCATGCAC | |
| | ATTGATGCCACCCTGTACACAGAATCTGATGTGCACCCTAGCTGTAAAGTG | |
| | ACCGCCATGAAGTGTTTTCTGCTGGAGCTGCAGGTGATTTCTCTGGAAAGC | |
| | GGAGATGCCTCTATCCACGACACAGTGGAGAATCTGATCATCCTGGCCAAC | |
| | AATAGCCTGAGCAGCAATGGCAATGTGACAGAGTCTGGCTGTAAGGAGTGT | |
| | GAGGAGCTGGAGGAGAAGAACATCAAGGAGTTTCTGCAGAGCTTTGTGCAC | |
| | ATCGTGCAGATGTTCATCAATACAAGCTCTGGCGGAGGATCTGGAGGAGGC | |
| | GGATCTGGAGGAGGAGGCAGTGGAGGCGGAGGATCTGGCGGAGGATCTCTG | |
| | CAGATTACATGCCCTCCTCCAATGTCTGTGGAGCACGCCGATATTTGGGTG | |
| | AAGTCCTACAGCCTGTACAGCAGAGAGAGATACATCTGCAACAGCGGCTTT | |
| | AAGAGAAAGGCCGGCACCTCTTCTCTGACAGAGTGCGTGCTGAATAAGGCC | |
| | ACAAATGTGGCCCACTGGACAACACCTAGCCTGAAGTGCATTAGAGATCCT | |
| | GCCCTGGTCCACCAGAGGCCTGCCCCTCCATCTACAGTGACAACAGCCGGA | |
| | GTGACACCTCAGCCTGAATCTCTGAGCCCTTCTGGAAAAGAACCTGCCGCC | |
| | AGCTCTCCTAGCTCTAATAATACCGCCGCCACAACAGCCGCCATTGTGCCT | |
| | GGATCTCAGCTGATGCCTAGCAAGTCTCCTAGCACAGGCACAACAGAGATC | |
| | AGCAGCCACGAATCTTCTCACGGAACACCTTCTCAGACCACCGCCAAGAAT | |
| | TGGGAGCTGACAGCCTCTGCCTCTCACCAGCCTCCAGGAGTGTATCCTCAG | |
| | GGCCACTCTGATACAACAGTGGCCATCAGCACATCTACAGTGCTGCTGTGT | |
| | GGACTGTCTGCCGTGTCTCTGCTGGCCTGTTACCTGAAGTCTAGACAGACA | |
| | CCTCCTCTGGCCTCTGTGGAGATGGAGGCCATGGAAGCCCTGCCTGTGACA | |
| | TGGGGAACAAGCAGCAGAGATGAAGACCTGGAGAATTGTTCTCACCACCTG | |
| | NNN at positions 169-171 make up a codon that encodes Ser or Cys | |
| AP15 nucleotide | NNNATCCAGAATCCCGAGCCTGCGGTGTACCAGCTGAAGGACCCCCGCTCT | 236 |
| sequence | CAGGATAGCACACTGTGCCTGTTCACCGACTTTGATAGCCAGATCAACGTG | |
| | CCTAAAACAATGGAGTCCGGCACCTTCATCACCGACAAGNNNGTGCTGGAT | |
| | ATGAAAGCGATGGACTCCAAGTCTAACGGCGCGATCGCGTGGTCCAATCAG | |
| | ACATCTTTCACCTGCCAGGATATCTTCAAGGAGACAAACGCGACCTATCCT | |
| | TCCTCTGACGTGCCATGTGATGCGACACTGACCGAGAAGAGCTTCGAGACA | |
| | GACATGAACCTGAATTTTCAGAATCTGNNNGTCNNNNNNCTGAGAATCCTG | |
| | CTGCTGAAGGTGGCGGGCTTTAATCTGCTGATGACACTGCGGCTGTGGAGT | |
| | TCCCGGGCGAAACGCTCTGGAAGCGGAGCGACCAATTTCAGCCTGCTGAAG | |
| | CAGGCGGGCGATGTGGAGGAGAACCCTGGCCCAATGGATTGGACCTGGATT | |
| | CTGTTTCTGGTGGCCGCTGCCACAAGAGTGCACAGCAACTGGGTGAATGTG | |
| | ATCAGCGACCTGAAGAAGATCGAGGATCTGATCCAGAGCATGCACATTGAT | |
| | GCCACCCTGTACACAGAATCTGATGTGCACCCTAGCTGTAAAGTGACCGCC | |
| | ATGAAGTGTTTTCTGCTGGAGCTGCAGGTGATTTCTCTGGAAAGCGGAGAT | |
| | GCCTCTATCCACGACACAGTGGAGAATCTGATCATCCTGGCCAACAATAGC | |
| | CTGAGCAGCAATGGCAATGTGACAGAGTCTGGCTGTAAGGAGTGTGAGGAG | |
| | CTGGAGGAGAAGAACATCAAGGAGTTTCTGCAGAGCTTTGTGCACATCGTG | |
| | CAGATGTTCATCAATACAAGCTCTGGCGGAGGATCTGGAGGAGGCGGATCT | |
| | GGAGGAGGAGGCAGTGGAGGCGGAGGATCTGGCGGAGGATCTCTGCAGATT | |
| | ACATGCCCTCCTCCAATGTCTGTGGAGCACGCCGATATTTGGGTGAAGTCC | |
| | TACAGCCTGTACAGCAGAGAGAGATACATCTGCAACAGCGGCTTTAAGAGA | |
| | AAGGCCGGCACCTCTTCTCTGACAGAGTGCGTGCTGAATAAGGCCACAAAT | |
| | GTGGCCCACTGGACAACACCTAGCCTGAAGTGCATTAGAGATCCTGCCCTG | |
| | GTCCACCAGAGGCCTGCCCCTCCATCTACAGTGACAACAGCCGGAGTGACA | |
| | CCTCAGCCTGAATCTCTGAGCCCTTCTGGAAAAGAACCTGCCGCCAGCTCT | |
| | CCTAGCTCTAATAATACCGCCGCCACAACAGCCGCCATTGTGCCTGGATCT | |
| | CAGCTGATGCCTAGCAAGTCTCCTAGCACAGGCACAACAGAGATCAGCAGC | |
| | CACGAATCTTCTCACGGAACACCTTCTCAGACCACCGCCAAGAATTGGGAG | |
| | CTGACAGCCTCTGCCTCTCACCAGCCTCCAGGAGTGTATCCTCAGGGCCAC | |
| | TCTGATACAACAGTGGCCATCAGCACATCTACAGTGCTGCTGTGTGGACTG | |
| | TCTGCCGTGTCTCTGCTGGCCTGTTACCTGAAGTCTAGACAGACACCTCCT | |
| | CTGGCCTCTGTGGAGATGGAGGCCATGGAAGCCCTGCCTGTGACATGGGGA | |
| | ACAAGCAGCAGAGATGAAGACCTGGAGAATTGTTCTCACCACCTG | |
| | NNN at positions 1-3 make up a codon that encodes Asn, Asp, His, or Tyr; | |
| | NNN at positions 142-144 make up a codon that encodes Thr or Cys; | |
| | NNN at positions 334-336 make up a codon that encodes Ser, Ala, Val, Leu, | |
| | Ile, Pro, Phe, Met, or Trp; | |
| | NNN at positions 340-342 make up a codon that encodes Met, Ala, Val, Leu, | |
| | Ile, Pro, Phe, or Trp; | |
| | NNN at positions 343-345 make up a codon that encodes Gly, Ala, Val, Leu, | |
| | Ile, Pro, Phe, Met, or Trp | |
| 15T nucleotide | ATGGATTGGACCTGGATTCTGTTTCTGGTGGCCGCTGCCACAAGAGTGCAC | 237 |
| sequence | AGCAACTGGGTGAATGTGATCAGCGACCTGAAGAAGATCGAGGATCTGATC | |
| | CAGAGCATGCACATTGATGCCACCCTGTACACAGAATCTGATGTGCACCCT | |
| | AGCTGTAAAGTGACCGCCATGAAGTGTTTTCTGCTGGAGCTGCAGGTGATT | |
| | TCTCTGGAAAGCGGAGATGCCTCTATCCACGACACAGTGGAGAATCTGATC | |
| | ATCCTGGCCAACAATAGCCTGAGCAGCAATGGCAATGTGACAGAGTCTGGC | |
| | TGTAAGGAGTGTGAGGAGCTGGAGGAGAAGAACATCAAGGAGTTTCTGCAG | |
| | AGCTTTGTGCACATCGTGCAGATGTTCATCAATACAAGCTCTGGCGGAGGA | |
| | TCTGGAGGAGGCGGATCTGGAGGAGGAGGCAGTGGAGGCGGAGGATCTGGC | |
| | GGAGGATCTCTGCAGATTACATGCCCTCCTCCAATGTCTGTGGAGCACGCC | |
| | GATATTTGGGTGAAGTCCTACAGCCTGTACAGCAGAGAGAGATACATCTGC | |
| | AACAGCGGCTTTAAGAGAAAGGCCGGCACCTCTTCTCTGACAGAGTGCGTG | |
| | CTGAATAAGGCCACAAATGTGGCCCACTGGACAACACCTAGCCTGAAGTGC | |
| | ATTAGAGATCCTGCCCTGGTCCACCAGAGGCCTGCCCCTCCATCTACAGTG | |
| | ACAACAGCCGGAGTGACACCTCAGCCTGAATCTCTGAGCCCTTCTGGAAAA | |
| | GAACCTGCCGCCAGCTCTCCTAGCTCTAATAATACCGCCGCCACAACAGCC | |
| | GCCATTGTGCCTGGATCTCAGCTGATGCCTAGCAAGTCTCCTAGCACAGGC | |
| | ACAACAGAGATCAGCAGCCACGAATCTTCTCACGGAACACCTTCTCAGACC | |
| | ACCGCCAAGAATTGGGAGCTGACAGCCTCTGCCTCTCACCAGCCTCCAGGA | |
| | GTGTATCCTCAGGGCCACTCTGATACAACAGTGGCCATCAGCACATCTACA | |
| | GTGCTGCTGTGTGGACTGTCTGCCGTGTCTCTGCTGGCCTGTTACCTGAAG | |
| | TCTAGACAGACACCTCCTCTGGCCTCTGTGGAGATGGAGGCCATGGAAGCC | |
| | CTGCCTGTGACATGGGGAACAAGCAGCAGAGATGAAGACCTGGAGAATTGT | |
| | TCTCACCACCTGCGGGCGAAACGCTCTGGAAGCGGAGAGGGCAGAGGAAGT | |
| | CTTCTAACATGCGGTGACGTGGAGGAGAATCCCGGCCCT | |
| AP15T nucleotide | NNNATCCAGAATCCCGAGCCTGCGGTGTACCAGCTGAAGGACCCCCGCTCT | 238 |
| sequence | CAGGATAGCACACTGTGCCTGTTCACCGACTTTGATAGCCAGATCAACGTG | |
| | CCTAAAACAATGGAGTCCGGCACCTTCATCACCGACAAGNNNGTGCTGGAT | |
| | ATGAAAGCGATGGACTCCAAGTCTAACGGCGCGATCGCGTGGTCCAATCAG | |
| | ACATCTTTCACCTGCCAGGATATCTTCAAGGAGACAAACGCGACCTATCCT | |
| | TCCTCTGACGTGCCATGTGATGCGACACTGACCGAGAAGAGCTTCGAGACA | |
| | GACATGAACCTGAATTTTCAGAATCTGNNNGTCNNNNNNCTGAGAATCCTG | |
| | CTGCTGAAGGTGGCGGGCTTTAATCTGCTGATGACACTGCGGCTGTGGAGT | |
| | TCCCGGGCGAAACGCTCTGGAAGCGGAGCGACCAATTTCAGCCTGCTGAAG | |
| | CAGGCGGGCGATGTGGAGGAGAACCCTGGCCCAATGGATTGGACCTGGATT | |
| | CTGTTTCTGGTGGCCGCTGCCACAAGAGTGCACAGCAACTGGGTGAATGTG | |
| | ATCAGCGACCTGAAGAAGATCGAGGATCTGATCCAGAGCATGCACATTGAT | |
| | GCCACCCTGTACACAGAATCTGATGTGCACCCTAGCTGTAAAGTGACCGCC | |
| | ATGAAGTGTTTTCTGCTGGAGCTGCAGGTGATTTCTCTGGAAAGCGGAGAT | |
| | GCCTCTATCCACGACACAGTGGAGAATCTGATCATCCTGGCCAACAATAGC | |
| | CTGAGCAGCAATGGCAATGTGACAGAGTCTGGCTGTAAGGAGTGTGAGGAG | |
| | CTGGAGGAGAAGAACATCAAGGAGTTTCTGCAGAGCTTTGTGCACATCGTG | |
| | CAGATGTTCATCAATACAAGCTCTGGCGGAGGATCTGGAGGAGGCGGATCT | |
| | GGAGGAGGAGGCAGTGGAGGCGGAGGATCTGGCGGAGGATCTCTGCAGATT | |
| | ACATGCCCTCCTCCAATGTCTGTGGAGCACGCCGATATTTGGGTGAAGTCC | |
| | TACAGCCTGTACAGCAGAGAGAGATACATCTGCAACAGCGGCTTTAAGAGA | |
| | AAGGCCGGCACCTCTTCTCTGACAGAGTGCGTGCTGAATAAGGCCACAAAT | |
| | GTGGCCCACTGGACAACACCTAGCCTGAAGTGCATTAGAGATCCTGCCCTG | |
| | GTCCACCAGAGGCCTGCCCCTCCATCTACAGTGACAACAGCCGGAGTGACA | |
| | CCTCAGCCTGAATCTCTGAGCCCTTCTGGAAAAGAACCTGCCGCCAGCTCT | |
| | CCTAGCTCTAATAATACCGCCGCCACAACAGCCGCCATTGTGCCTGGATCT | |
| | CAGCTGATGCCTAGCAAGTCTCCTAGCACAGGCACAACAGAGATCAGCAGC | |
| | CACGAATCTTCTCACGGAACACCTTCTCAGACCACCGCCAAGAATTGGGAG | |
| | CTGACAGCCTCTGCCTCTCACCAGCCTCCAGGAGTGTATCCTCAGGGCCAC | |
| | TCTGATACAACAGTGGCCATCAGCACATCTACAGTGCTGCTGTGTGGACTG | |
| | TCTGCCGTGTCTCTGCTGGCCTGTTACCTGAAGTCTAGACAGACACCTCCT | |
| | CTGGCCTCTGTGGAGATGGAGGCCATGGAAGCCCTGCCTGTGACATGGGGA | |
| | ACAAGCAGCAGAGATGAAGACCTGGAGAATTGTTCTCACCACCTGCGGGCG | |
| | AAACGCTCTGGAAGCGGAGAGGGCAGAGGAAGTCTTCTAACATGCGGTGAC | |
| | GTGGAGGAGAATCCCGGCCCT | |
| | NNN at positions 1-3 make up a codon that encodes Asn, Asp, His, or Tyr; | |
| | NNN at positions 142-144 make up a codon that encodes Thr or Cys; | |
| | NNN at positions 334-336 make up a codon that encodes Ser, Ala, Val, Leu, | |
| | Ile, Pro, Phe, Met, or Trp; | |
| | NNN at positions 340-342 make up a codon that encodes Met, Ala, Val, Leu, | |
| | Ile, Pro, Phe, or Trp; | |
| | NNN at positions 343-345 make up a codon that encodes Gly, Ala, Val, Leu, | |
| | Ile, Pro, Phe, Met, or Trp | |
| AT15 nucleotide | NNNATCCAGAATCCCGAGCCTGCGGTGTACCAGCTGAAGGACCCCCGCTCT | 239 |
| sequence | CAGGATAGCACACTGTGCCTGTTCACCGACTTTGATAGCCAGATCAACGTG | |
| | CCTAAAACAATGGAGTCCGGCACCTTCATCACCGACAAGNNNGTGCTGGAT | |
| | ATGAAAGCGATGGACTCCAAGTCTAACGGCGCGATCGCGTGGTCCAATCAG | |
| | ACATCTTTCACCTGCCAGGATATCTTCAAGGAGACAAACGCGACCTATCCT | |
| | TCCTCTGACGTGCCATGTGATGCGACACTGACCGAGAAGAGCTTCGAGACA | |
| | GACATGAACCTGAATTTTCAGAATCTGNNNGTCNNNNNNCTGAGAATCCTG | |
| | CTGCTGAAGGTGGCGGGCTTTAATCTGCTGATGACACTGCGGCTGTGGAGT | |
| | TCCCGGGCGAAACGCTCTGGAAGCGGAGAGGGCAGAGGAAGTCTTCTAACA | |
| | TGCGGTGACGTGGAGGAGAATCCCGGCCCTATGGATTGGACCTGGATTCTG | |
| | TTTCTGGTGGCCGCTGCCACAAGAGTGCACAGCAACTGGGTGAATGTGATC | |
| | AGCGACCTGAAGAAGATCGAGGATCTGATCCAGAGCATGCACATTGATGCC | |
| | ACCCTGTACACAGAATCTGATGTGCACCCTAGCTGTAAAGTGACCGCCATG | |
| | AAGTGTTTTCTGCTGGAGCTGCAGGTGATTTCTCTGGAAAGCGGAGATGCC | |
| | TCTATCCACGACACAGTGGAGAATCTGATCATCCTGGCCAACAATAGCCTG | |
| | AGCAGCAATGGCAATGTGACAGAGTCTGGCTGTAAGGAGTGTGAGGAGCTG | |
| | GAGGAGAAGAACATCAAGGAGTTTCTGCAGAGCTTTGTGCACATCGTGCAG | |
| | ATGTTCATCAATACAAGCTCTGGCGGAGGATCTGGAGGAGGCGGATCTGGA | |
| | GGAGGAGGCAGTGGAGGCGGAGGATCTGGCGGAGGATCTCTGCAGATTACA | |
| | TGCCCTCCTCCAATGTCTGTGGAGCACGCCGATATTTGGGTGAAGTCCTAC | |
| | AGCCTGTACAGCAGAGAGAGATACATCTGCAACAGCGGCTTTAAGAGAAAG | |
| | GCCGGCACCTCTTCTCTGACAGAGTGCGTGCTGAATAAGGCCACAAATGTG | |
| | GCCCACTGGACAACACCTAGCCTGAAGTGCATTAGAGATCCTGCCCTGGTC | |
| | CACCAGAGGCCTGCCCCTCCATCTACAGTGACAACAGCCGGAGTGACACCT | |
| | CAGCCTGAATCTCTGAGCCCTTCTGGAAAAGAACCTGCCGCCAGCTCTCCT | |
| | AGCTCTAATAATACCGCCGCCACAACAGCCGCCATTGTGCCTGGATCTCAG | |
| | CTGATGCCTAGCAAGTCTCCTAGCACAGGCACAACAGAGATCAGCAGCCAC | |
| | GAATCTTCTCACGGAACACCTTCTCAGACCACCGCCAAGAATTGGGAGCTG | |
| | ACAGCCTCTGCCTCTCACCAGCCTCCAGGAGTGTATCCTCAGGGCCACTCT | |
| | GATACAACAGTGGCCATCAGCACATCTACAGTGCTGCTGTGTGGACTGTCT | |
| | GCCGTGTCTCTGCTGGCCTGTTACCTGAAGTCTAGACAGACACCTCCTCTG | |
| | GCCTCTGTGGAGATGGAGGCCATGGAAGCCCTGCCTGTGACATGGGGAACA | |
| | AGCAGCAGAGATGAAGACCTGGAGAATTGTTCTCACCACCTG | |
| | NNN at positions 1-3 make up a codon that encodes Asn, Asp, His, or Tyr; | |
| | NNN at positions 142-144 make up a codon that encodes Thr or Cys; | |
| | NNN at positions 334-336 make up a codon that encodes Ser, Ala, Val, Leu, | |
| | Ile, Pro, Phe, Met, or Trp; | |
| | NNN at positions 340-342 make up a codon that encodes Met, Ala, Val, Leu, | |
| | Ile, Pro, Phe, or Trp; | |
| | NNN at positions 343-345 make up a codon that encodes Gly, Ala, Val, Leu, | |
| | Ile, Pro, Phe, Met, or Trp | |
| 15P nucleotide | ATGGATTGGACCTGGATTCTGTTTCTGGTGGCCGCTGCCACAAGAGTGCAC | 240 |
| sequence | AGCAACTGGGTGAATGTGATCAGCGACCTGAAGAAGATCGAGGATCTGATC | |
| | CAGAGCATGCACATTGATGCCACCCTGTACACAGAATCTGATGTGCACCCT | |
| | AGCTGTAAAGTGACCGCCATGAAGTGTTTTCTGCTGGAGCTGCAGGTGATT | |
| | TCTCTGGAAAGCGGAGATGCCTCTATCCACGACACAGTGGAGAATCTGATC | |
| | ATCCTGGCCAACAATAGCCTGAGCAGCAATGGCAATGTGACAGAGTCTGGC | |
| | TGTAAGGAGTGTGAGGAGCTGGAGGAGAAGAACATCAAGGAGTTTCTGCAG | |
| | AGCTTTGTGCACATCGTGCAGATGTTCATCAATACAAGCTCTGGCGGAGGA | |
| | TCTGGAGGAGGCGGATCTGGAGGAGGAGGCAGTGGAGGCGGAGGATCTGGC | |
| | GGAGGATCTCTGCAGATTACATGCCCTCCTCCAATGTCTGTGGAGCACGCC | |
| | GATATTTGGGTGAAGTCCTACAGCCTGTACAGCAGAGAGAGATACATCTGC | |
| | AACAGCGGCTTTAAGAGAAAGGCCGGCACCTCTTCTCTGACAGAGTGCGTG | |
| | CTGAATAAGGCCACAAATGTGGCCCACTGGACAACACCTAGCCTGAAGTGC | |
| | ATTAGAGATCCTGCCCTGGTCCACCAGAGGCCTGCCCCTCCATCTACAGTG | |
| | ACAACAGCCGGAGTGACACCTCAGCCTGAATCTCTGAGCCCTTCTGGAAAA | |
| | GAACCTGCCGCCAGCTCTCCTAGCTCTAATAATACCGCCGCCACAACAGCC | |
| | GCCATTGTGCCTGGATCTCAGCTGATGCCTAGCAAGTCTCCTAGCACAGGC | |
| | ACAACAGAGATCAGCAGCCACGAATCTTCTCACGGAACACCTTCTCAGACC | |
| | ACCGCCAAGAATTGGGAGCTGACAGCCTCTGCCTCTCACCAGCCTCCAGGA | |
| | GTGTATCCTCAGGGCCACTCTGATACAACAGTGGCCATCAGCACATCTACA | |
| | GTGCTGCTGTGTGGACTGTCTGCCGTGTCTCTGCTGGCCTGTTACCTGAAG | |
| | TCTAGACAGACACCTCCTCTGGCCTCTGTGGAGATGGAGGCCATGGAAGCC | |
| | CTGCCTGTGACATGGGGAACAAGCAGCAGAGATGAAGACCTGGAGAATTGT | |
| | TCTCACCACCTGCGGGCGAAACGCTCTGGAAGCGGAGCGACCAATTTCAGC | |
| | CTGCTGAAGCAGGCGGGCGATGTGGAGGAGAACCCTGGCCCA | |
| AT15P nucleotide | NNNATCCAGAATCCCGAGCCTGCGGTGTACCAGCTGAAGGACCCCCGCTCT | 241 |
| sequence | CAGGATAGCACACTGTGCCTGTTCACCGACTTTGATAGCCAGATCAACGTG | |
| | CCTAAAACAATGGAGTCCGGCACCTTCATCACCGACAAGNNNGTGCTGGAT | |
| | ATGAAAGCGATGGACTCCAAGTCTAACGGCGCGATCGCGTGGTCCAATCAG | |
| | ACATCTTTCACCTGCCAGGATATCTTCAAGGAGACAAACGCGACCTATCCT | |
| | TCCTCTGACGTGCCATGTGATGCGACACTGACCGAGAAGAGCTTCGAGACA | |
| | GACATGAACCTGAATTTTCAGAATCTGNNNGTCNNNNNNCTGAGAATCCTG | |
| | CTGCTGAAGGTGGCGGGCTTTAATCTGCTGATGACACTGCGGCTGTGGAGT | |
| | TCCCGGGCGAAACGCTCTGGAAGCGGAGAGGGCAGAGGAAGTCTTCTAACA | |
| | TGCGGTGACGTGGAGGAGAATCCCGGCCCTATGGATTGGACCTGGATTCTG | |
| | TTTCTGGTGGCCGCTGCCACAAGAGTGCACAGCAACTGGGTGAATGTGATC | |
| | AGCGACCTGAAGAAGATCGAGGATCTGATCCAGAGCATGCACATTGATGCC | |
| | ACCCTGTACACAGAATCTGATGTGCACCCTAGCTGTAAAGTGACCGCCATG | |
| | AAGTGTTTTCTGCTGGAGCTGCAGGTGATTTCTCTGGAAAGCGGAGATGCC | |
| | TCTATCCACGACACAGTGGAGAATCTGATCATCCTGGCCAACAATAGCCTG | |
| | AGCAGCAATGGCAATGTGACAGAGTCTGGCTGTAAGGAGTGTGAGGAGCTG | |
| | GAGGAGAAGAACATCAAGGAGTTTCTGCAGAGCTTTGTGCACATCGTGCAG | |
| | ATGTTCATCAATACAAGCTCTGGCGGAGGATCTGGAGGAGGCGGATCTGGA | |
| | GGAGGAGGCAGTGGAGGCGGAGGATCTGGCGGAGGATCTCTGCAGATTACA | |
| | TGCCCTCCTCCAATGTCTGTGGAGCACGCCGATATTTGGGTGAAGTCCTAC | |
| | AGCCTGTACAGCAGAGAGAGATACATCTGCAACAGCGGCTTTAAGAGAAAG | |
| | GCCGGCACCTCTTCTCTGACAGAGTGCGTGCTGAATAAGGCCACAAATGTG | |
| | GCCCACTGGACAACACCTAGCCTGAAGTGCATTAGAGATCCTGCCCTGGTC | |
| | CACCAGAGGCCTGCCCCTCCATCTACAGTGACAACAGCCGGAGTGACACCT | |
| | CAGCCTGAATCTCTGAGCCCTTCTGGAAAAGAACCTGCCGCCAGCTCTCCT | |
| | AGCTCTAATAATACCGCCGCCACAACAGCCGCCATTGTGCCTGGATCTCAG | |
| | CTGATGCCTAGCAAGTCTCCTAGCACAGGCACAACAGAGATCAGCAGCCAC | |
| | GAATCTTCTCACGGAACACCTTCTCAGACCACCGCCAAGAATTGGGAGCTG | |
| | ACAGCCTCTGCCTCTCACCAGCCTCCAGGAGTGTATCCTCAGGGCCACTCT | |
| | GATACAACAGTGGCCATCAGCACATCTACAGTGCTGCTGTGTGGACTGTCT | |
| | GCCGTGTCTCTGCTGGCCTGTTACCTGAAGTCTAGACAGACACCTCCTCTG | |
| | GCCTCTGTGGAGATGGAGGCCATGGAAGCCCTGCCTGTGACATGGGGAACA | |
| | AGCAGCAGAGATGAAGACCTGGAGAATTGTTCTCACCACCTGCGGGCGAAA | |
| | CGCTCTGGAAGCGGAGCGACCAATTTCAGCCTGCTGAAGCAGGCGGGCGAT | |
| | GTGGAGGAGAACCCTGGCCCA | |
| | NNN at positions 1-3 make up a codon that encodes Asn, Asp, His, or Tyr; | |
| | NNN at positions 142-144 make up a codon that encodes Thr or Cys; | |
| | NNN at positions 334-336 make up a codon that encodes Ser, Ala, Val, Leu, | |
| | Ile, Pro, Phe, Met, or Trp; | |
| | NNN at positions 340-342 make up a codon that encodes Met, Ala, Val, Leu, | |
| | Ile, Pro, Phe, or Trp; | |
| | NNN at positions 343-345 make up a codon that encodes Gly, Ala, Val, Leu, | |
| | Ile, Pro, Phe, Met, or Trp | |
| BP15T nucleotide | GAGGACCTGAGGAACGTGACCCCACCTAAAGTGAGCCTGTTCGAGCCATCC | 242 |
| sequence | AAGGCGGAGATCGCGAATAAGCAGAAAGCGACCCTGGTGTGCCTGGCGAGG | |
| | GGCTTCTTTCCCGATCACGTGGAGCTGTCCTGGTGGGTGAACGGCAAAGAG | |
| | GTGCACTCTGGCGTGNNNACAGACCCTCAGGCGTACAAGGAGAGCAATTAC | |
| | TCCTATTGTCTGTCTAGCAGACTGAGGGTGAGCGCGACCTTTTGGCACAAC | |
| | CCCCGGAATCACTTCCGCTGCCAGGTGCAGTTTCACGGCCTGTCCGAGGAG | |
| | GATAAATGGCCTGAGGGCTCTCCAAAGCCCGTGACACAGAATATCAGCGCG | |
| | GAGGCGTGGGGAAGAGCGGACTGTGGCATTACAAGCGCGTCCTATCAGCAG | |
| | GGCGTGCTGTCCGCGACCATCCTGTACGAGATTCTGCTGGGCAAGGCGACA | |
| | CTGTATGCGGTGCTGGTGTCCACCCTGGTGGTCATGGCGATGGTGAAGAGG | |
| | AAAAACTCTCGGGCGAAACGCTCTGGAAGCGGAGCGACCAATTTCAGCCTG | |
| | CTGAAGCAGGCGGGCGATGTGGAGGAGAACCCTGGCCCAATGGATTGGACC | |
| | TGGATTCTGTTTCTGGTGGCCGCTGCCACAAGAGTGCACAGCAACTGGGTG | |
| | AATGTGATCAGCGACCTGAAGAAGATCGAGGATCTGATCCAGAGCATGCAC | |
| | ATTGATGCCACCCTGTACACAGAATCTGATGTGCACCCTAGCTGTAAAGTG | |
| | ACCGCCATGAAGTGTTTTCTGCTGGAGCTGCAGGTGATTTCTCTGGAAAGC | |
| | GGAGATGCCTCTATCCACGACACAGTGGAGAATCTGATCATCCTGGCCAAC | |
| | AATAGCCTGAGCAGCAATGGCAATGTGACAGAGTCTGGCTGTAAGGAGTGT | |
| | GAGGAGCTGGAGGAGAAGAACATCAAGGAGTTTCTGCAGAGCTTTGTGCAC | |
| | ATCGTGCAGATGTTCATCAATACAAGCTCTGGCGGAGGATCTGGAGGAGGC | |
| | GGATCTGGAGGAGGAGGCAGTGGAGGCGGAGGATCTGGCGGAGGATCTCTG | |
| | CAGATTACATGCCCTCCTCCAATGTCTGTGGAGCACGCCGATATTTGGGTG | |
| | AAGTCCTACAGCCTGTACAGCAGAGAGAGATACATCTGCAACAGCGGCTTT | |
| | AAGAGAAAGGCCGGCACCTCTTCTCTGACAGAGTGCGTGCTGAATAAGGCC | |
| | ACAAATGTGGCCCACTGGACAACACCTAGCCTGAAGTGCATTAGAGATCCT | |
| | GCCCTGGTCCACCAGAGGCCTGCCCCTCCATCTACAGTGACAACAGCCGGA | |
| | GTGACACCTCAGCCTGAATCTCTGAGCCCTTCTGGAAAAGAACCTGCCGCC | |
| | AGCTCTCCTAGCTCTAATAATACCGCCGCCACAACAGCCGCCATTGTGCCT | |
| | GGATCTCAGCTGATGCCTAGCAAGTCTCCTAGCACAGGCACAACAGAGATC | |
| | AGCAGCCACGAATCTTCTCACGGAACACCTTCTCAGACCACCGCCAAGAAT | |
| | TGGGAGCTGACAGCCTCTGCCTCTCACCAGCCTCCAGGAGTGTATCCTCAG | |
| | GGCCACTCTGATACAACAGTGGCCATCAGCACATCTACAGTGCTGCTGTGT | |
| | GGACTGTCTGCCGTGTCTCTGCTGGCCTGTTACCTGAAGTCTAGACAGACA | |
| | CCTCCTCTGGCCTCTGTGGAGATGGAGGCCATGGAAGCCCTGCCTGTGACA | |
| | TGGGGAACAAGCAGCAGAGATGAAGACCTGGAGAATTGTTCTCACCACCTG | |
| | CGGGCGAAACGCTCTGGAAGCGGAGAGGGCAGAGGAAGTCTTCTAACATGC | |
| | GGTGACGTGGAGGAGAATCCCGGCCCT | |
| | NNN at positions 169-171 make up a codon that encodes Ser or Cys | |
| BT15P nucleotide | GAGGACCTGAGGAACGTGACCCCACCTAAAGTGAGCCTGTTCGAGCCATCC | 243 |
| sequence | AAGGCGGAGATCGCGAATAAGCAGAAAGCGACCCTGGTGTGCCTGGCGAGG | |
| | GGCTTCTTTCCCGATCACGTGGAGCTGTCCTGGTGGGTGAACGGCAAAGAG | |
| | GTGCACTCTGGCGTGNNNACAGACCCTCAGGCGTACAAGGAGAGCAATTAC | |
| | TCCTATTGTCTGTCTAGCAGACTGAGGGTGAGCGCGACCTTTTGGCACAAC | |
| | CCCCGGAATCACTTCCGCTGCCAGGTGCAGTTTCACGGCCTGTCCGAGGAG | |
| | GATAAATGGCCTGAGGGCTCTCCAAAGCCCGTGACACAGAATATCAGCGCG | |
| | GAGGCGTGGGGAAGAGCGGACTGTGGCATTACAAGCGCGTCCTATCAGCAG | |
| | GGCGTGCTGTCCGCGACCATCCTGTACGAGATTCTGCTGGGCAAGGCGACA | |
| | CTGTATGCGGTGCTGGTGTCCACCCTGGTGGTCATGGCGATGGTGAAGAGG | |
| | AAAAACTCTCGGGCGAAACGCTCTGGAAGCGGAGAGGGCAGAGGAAGTCTT | |
| | CTAACATGCGGTGACGTGGAGGAGAATCCCGGCCCTATGGATTGGACCTGG | |
| | ATTCTGTTTCTGGTGGCCGCTGCCACAAGAGTGCACAGCAACTGGGTGAAT | |
| | GTGATCAGCGACCTGAAGAAGATCGAGGATCTGATCCAGAGCATGCACATT | |
| | GATGCCACCCTGTACACAGAATCTGATGTGCACCCTAGCTGTAAAGTGACC | |
| | GCCATGAAGTGTTTTCTGCTGGAGCTGCAGGTGATTTCTCTGGAAAGCGGA | |
| | GATGCCTCTATCCACGACACAGTGGAGAATCTGATCATCCTGGCCAACAAT | |
| | AGCCTGAGCAGCAATGGCAATGTGACAGAGTCTGGCTGTAAGGAGTGTGAG | |
| | GAGCTGGAGGAGAAGAACATCAAGGAGTTTCTGCAGAGCTTTGTGCACATC | |
| | GTGCAGATGTTCATCAATACAAGCTCTGGCGGAGGATCTGGAGGAGGCGGA | |
| | TCTGGAGGAGGAGGCAGTGGAGGCGGAGGATCTGGCGGAGGATCTCTGCAG | |
| | ATTACATGCCCTCCTCCAATGTCTGTGGAGCACGCCGATATTTGGGTGAAG | |
| | TCCTACAGCCTGTACAGCAGAGAGAGATACATCTGCAACAGCGGCTTTAAG | |
| | AGAAAGGCCGGCACCTCTTCTCTGACAGAGTGCGTGCTGAATAAGGCCACA | |
| | AATGTGGCCCACTGGACAACACCTAGCCTGAAGTGCATTAGAGATCCTGCC | |
| | CTGGTCCACCAGAGGCCTGCCCCTCCATCTACAGTGACAACAGCCGGAGTG | |
| | ACACCTCAGCCTGAATCTCTGAGCCCTTCTGGAAAAGAACCTGCCGCCAGC | |
| | TCTCCTAGCTCTAATAATACCGCCGCCACAACAGCCGCCATTGTGCCTGGA | |
| | TCTCAGCTGATGCCTAGCAAGTCTCCTAGCACAGGCACAACAGAGATCAGC | |
| | AGCCACGAATCTTCTCACGGAACACCTTCTCAGACCACCGCCAAGAATTGG | |
| | GAGCTGACAGCCTCTGCCTCTCACCAGCCTCCAGGAGTGTATCCTCAGGGC | |
| | CACTCTGATACAACAGTGGCCATCAGCACATCTACAGTGCTGCTGTGTGGA | |
| | CTGTCTGCCGTGTCTCTGCTGGCCTGTTACCTGAAGTCTAGACAGACACCT | |
| | CCTCTGGCCTCTGTGGAGATGGAGGCCATGGAAGCCCTGCCTGTGACATGG | |
| | GGAACAAGCAGCAGAGATGAAGACCTGGAGAATTGTTCTCACCACCTGCGG | |
| | GCGAAACGCTCTGGAAGCGGAGCGACCAATTTCAGCCTGCTGAAGCAGGCG | |
| | GGCGATGTGGAGGAGAACCCTGGCCCA | |
| | NNN at positions 169-171 make up a codon that encodes Ser or Cys | |

TABLE 11B
Exemplary polynucleotide sequences for use in polycistronic expression
cassette.

| | | SEQ ID |
|---|---|---|
| Description | Sequence | NO: |
| AP nucleotide | AACATCCAGAATCCCGAGCCTGCGGTGTACCAGCTGAAGGACCCCCGCTCT | 250 |
| sequence | CAGGATAGCACACTGTGCCTGTTCACCGACTTTGATAGCCAGATCAACGTG | |
| | CCTAAAACAATGGAGTCCGGCACCTTCATCACCGACAAGTGCGTGCTGGAT | |
| | ATGAAAGCGATGGACTCCAAGTCTAACGGCGCGATCGCGTGGTCCAATCAG | |
| | ACATCTTTCACCTGCCAGGATATCTTCAAGGAGACAAACGCGACCTATCCT | |
| | TCCTCTGACGTGCCATGTGATGCGACACTGACCGAGAAGAGCTTCGAGACA | |
| | GACATGAACCTGAATTTTCAGAATCTGCTGGTCATCGTGCTGAGAATCCTG | |
| | CTGCTGAAGGTGGCGGGCTTTAATCTGCTGATGACACTGCGGCTGTGGAGT | |
| | TCCCGGGCGAAACGCTCTGGAAGCGGAGCGACCAATTTCAGCCTGCTGAAG | |
| | CAGGCGGGCGATGTGGAGGAGAACCCTGGCCCA | |
| BT nucleotide | GAGGACCTGAGGAACGTGACCCCACCTAAAGTGAGCCTGTTCGAGCCATCC | 251 |
| sequence | AAGGCGGAGATCGCGAATAAGCAGAAAGCGACCCTGGTGTGCCTGGCGAGG | |
| | GGCTTCTTTCCCGATCACGTGGAGCTGTCCTGGTGGGTGAACGGCAAAGAG | |
| | GTGCACTCTGGCGTGTGCACAGACCCTCAGGCGTACAAGGAGAGCAATTAC | |
| | TCCTATTGTCTGTCTAGCAGACTGAGGGTGAGCGCGACCTTTTGGCACAAC | |
| | CCCCGGAATCACTTCCGCTGCCAGGTGCAGTTTCACGGCCTGTCCGAGGAG | |
| | GATAAATGGCCTGAGGGCTCTCCAAAGCCCGTGACACAGAATATCAGCGCG | |
| | GAGGCGTGGGGAAGAGCGGACTGTGGCATTACAAGCGCGTCCTATCAGCAG | |
| | GGCGTGCTGTCCGCGACCATCCTGTACGAGATTCTGCTGGGCAAGGCGACA | |
| | CTGTATGCGGTGCTGGTGTCCACCCTGGTGGTCATGGCGATGGTGAAGAGG | |
| | AAAAACTCTCGGGCGAAACGCTCTGGAAGCGGAGAGGGCAGAGGAAGTCTT | |
| | CTAACATGCGGTGACGTGGAGGAGAATCCCGGCCCT | |
| BT15 nucleotide | GAGGACCTGAGGAACGTGACCCCACCTAAAGTGAGCCTGTTCGAGCCATCC | 252 |
| sequence | AAGGCGGAGATCGCGAATAAGCAGAAAGCGACCCTGGTGTGCCTGGCGAGG | |
| | GGCTTCTTTCCCGATCACGTGGAGCTGTCCTGGTGGGTGAACGGCAAAGAG | |
| | GTGCACTCTGGCGTGTGCACAGACCCTCAGGCGTACAAGGAGAGCAATTAC | |
| | TCCTATTGTCTGTCTAGCAGACTGAGGGTGAGCGCGACCTTTTGGCACAAC | |
| | CCCCGGAATCACTTCCGCTGCCAGGTGCAGTTTCACGGCCTGTCCGAGGAG | |
| | GATAAATGGCCTGAGGGCTCTCCAAAGCCCGTGACACAGAATATCAGCGCG | |
| | GAGGCGTGGGGAAGAGCGGACTGTGGCATTACAAGCGCGTCCTATCAGCAG | |
| | GGCGTGCTGTCCGCGACCATCCTGTACGAGATTCTGCTGGGCAAGGCGACA | |
| | CTGTATGCGGTGCTGGTGTCCACCCTGGTGGTCATGGCGATGGTGAAGAGG | |
| | AAAAACTCTCGGGCGAAACGCTCTGGAAGCGGAGAGGGCAGAGGAAGTCTT | |
| | CTAACATGCGGTGACGTGGAGGAGAATCCCGGCCCTATGGATTGGACCTGG | |
| | ATTCTGTTTCTGGTGGCCGCTGCCACAAGAGTGCACAGCAACTGGGTGAAT | |
| | GTGATCAGCGACCTGAAGAAGATCGAGGATCTGATCCAGAGCATGCACATT | |
| | GATGCCACCCTGTACACAGAATCTGATGTGCACCCTAGCTGTAAAGTGACC | |
| | GCCATGAAGTGTTTTCTGCTGGAGCTGCAGGTGATTTCTCTGGAAAGCGGA | |
| | GATGCCTCTATCCACGACACAGTGGAGAATCTGATCATCCTGGCCAACAAT | |
| | AGCCTGAGCAGCAATGGCAATGTGACAGAGTCTGGCTGTAAGGAGTGTGAG | |
| | GAGCTGGAGGAGAAGAACATCAAGGAGTTTCTGCAGAGCTTTGTGCACATC | |
| | GTGCAGATGTTCATCAATACAAGCTCTGGCGGAGGATCTGGAGGAGGCGGA | |
| | TCTGGAGGAGGAGGCAGTGGAGGCGGAGGATCTGGCGGAGGATCTCTGCAG | |
| | ATTACATGCCCTCCTCCAATGTCTGTGGAGCACGCCGATATTTGGGTGAAG | |
| | TCCTACAGCCTGTACAGCAGAGAGAGATACATCTGCAACAGCGGCTTTAAG | |
| | AGAAAGGCCGGCACCTCTTCTCTGACAGAGTGCGTGCTGAATAAGGCCACA | |
| | AATGTGGCCCACTGGACAACACCTAGCCTGAAGTGCATTAGAGATCCTGCC | |
| | CTGGTCCACCAGAGGCCTGCCCCTCCATCTACAGTGACAACAGCCGGAGTG | |
| | ACACCTCAGCCTGAATCTCTGAGCCCTTCTGGAAAAGAACCTGCCGCCAGC | |
| | TCTCCTAGCTCTAATAATACCGCCGCCACAACAGCCGCCATTGTGCCTGGA | |
| | TCTCAGCTGATGCCTAGCAAGTCTCCTAGCACAGGCACAACAGAGATCAGC | |
| | AGCCACGAATCTTCTCACGGAACACCTTCTCAGACCACCGCCAAGAATTGG | |
| | GAGCTGACAGCCTCTGCCTCTCACCAGCCTCCAGGAGTGTATCCTCAGGGC | |
| | CACTCTGATACAACAGTGGCCATCAGCACATCTACAGTGCTGCTGTGTGGA | |
| | CTGTCTGCCGTGTCTCTGCTGGCCTGTTACCTGAAGTCTAGACAGACACCT | |
| | CCTCTGGCCTCTGTGGAGATGGAGGCCATGGAAGCCCTGCCTGTGACATGG | |
| | GGAACAAGCAGCAGAGATGAAGACCTGGAGAATTGTTCTCACCACCTG | |
| AT nucleotide | AACATCCAGAATCCCGAGCCTGCGGTGTACCAGCTGAAGGACCCCCGCTCT | 253 |
| sequence | CAGGATAGCACACTGTGCCTGTTCACCGACTTTGATAGCCAGATCAACGTG | |
| | CCTAAAACAATGGAGTCCGGCACCTTCATCACCGACAAGTGCGTGCTGGAT | |
| | ATGAAAGCGATGGACTCCAAGTCTAACGGCGCGATCGCGTGGTCCAATCAG | |
| | ACATCTTTCACCTGCCAGGATATCTTCAAGGAGACAAACGCGACCTATCCT | |
| | TCCTCTGACGTGCCATGTGATGCGACACTGACCGAGAAGAGCTTCGAGACA | |
| | GACATGAACCTGAATTTTCAGAATCTGCTGGTCATCGTGCTGAGAATCCTG | |
| | CTGCTGAAGGTGGCGGGCTTTAATCTGCTGATGACACTGCGGCTGTGGAGT | |
| | TCCCGGGCGAAACGCTCTGGAAGCGGAGAGGGCAGAGGAAGTCTTCTAACA | |
| | TGCGGTGACGTGGAGGAGAATCCCGGCCCT | |
| BP nucleotide | GAGGACCTGAGGAACGTGACCCCACCTAAAGTGAGCCTGTTCGAGCCATCC | 254 |
| sequence | AAGGCGGAGATCGCGAATAAGCAGAAAGCGACCCTGGTGTGCCTGGCGAGG | |
| | GGCTTCTTTCCCGATCACGTGGAGCTGTCCTGGTGGGTGAACGGCAAAGAG | |
| | GTGCACTCTGGCGTGTGCACAGACCCTCAGGCGTACAAGGAGAGCAATTAC | |
| | TCCTATTGTCTGTCTAGCAGACTGAGGGTGAGCGCGACCTTTTGGCACAAC | |
| | CCCCGGAATCACTTCCGCTGCCAGGTGCAGTTTCACGGCCTGTCCGAGGAG | |
| | GATAAATGGCCTGAGGGCTCTCCAAAGCCCGTGACACAGAATATCAGCGCG | |
| | GAGGCGTGGGGAAGAGCGGACTGTGGCATTACAAGCGCGTCCTATCAGCAG | |
| | GGCGTGCTGTCCGCGACCATCCTGTACGAGATTCTGCTGGGCAAGGCGACA | |
| | CTGTATGCGGTGCTGGTGTCCACCCTGGTGGTCATGGCGATGGTGAAGAGG | |
| | AAAAACTCTCGGGCGAAACGCTCTGGAAGCGGAGCGACCAATTTCAGCCTG | |
| | CTGAAGCAGGCGGGCGATGTGGAGGAGAACCCTGGCCCA | |
| BP15 nucleotide | GAGGACCTGAGGAACGTGACCCCACCTAAAGTGAGCCTGTTCGAGCCATCC | 255 |
| sequence | AAGGCGGAGATCGCGAATAAGCAGAAAGCGACCCTGGTGTGCCTGGCGAGG | |
| | GGCTTCTTTCCCGATCACGTGGAGCTGTCCTGGTGGGTGAACGGCAAAGAG | |
| | GTGCACTCTGGCGTGTGCACAGACCCTCAGGCGTACAAGGAGAGCAATTAC | |
| | TCCTATTGTCTGTCTAGCAGACTGAGGGTGAGCGCGACCTTTTGGCACAAC | |
| | CCCCGGAATCACTTCCGCTGCCAGGTGCAGTTTCACGGCCTGTCCGAGGAG | |
| | GATAAATGGCCTGAGGGCTCTCCAAAGCCCGTGACACAGAATATCAGCGCG | |
| | GAGGCGTGGGGAAGAGCGGACTGTGGCATTACAAGCGCGTCCTATCAGCAG | |
| | GGCGTGCTGTCCGCGACCATCCTGTACGAGATTCTGCTGGGCAAGGCGACA | |
| | CTGTATGCGGTGCTGGTGTCCACCCTGGTGGTCATGGCGATGGTGAAGAGG | |
| | AAAAACTCTCGGGCGAAACGCTCTGGAAGCGGAGCGACCAATTTCAGCCTG | |
| | CTGAAGCAGGCGGGCGATGTGGAGGAGAACCCTGGCCCAATGGATTGGACC | |
| | TGGATTCTGTTTCTGGTGGCCGCTGCCACAAGAGTGCACAGCAACTGGGTG | |
| | AATGTGATCAGCGACCTGAAGAAGATCGAGGATCTGATCCAGAGCATGCAC | |
| | ATTGATGCCACCCTGTACACAGAATCTGATGTGCACCCTAGCTGTAAAGTG | |
| | ACCGCCATGAAGTGTTTTCTGCTGGAGCTGCAGGTGATTTCTCTGGAAAGC | |
| | GGAGATGCCTCTATCCACGACACAGTGGAGAATCTGATCATCCTGGCCAAC | |
| | AATAGCCTGAGCAGCAATGGCAATGTGACAGAGTCTGGCTGTAAGGAGTGT | |
| | GAGGAGCTGGAGGAGAAGAACATCAAGGAGTTTCTGCAGAGCTTTGTGCAC | |
| | ATCGTGCAGATGTTCATCAATACAAGCTCTGGCGGAGGATCTGGAGGAGGC | |
| | GGATCTGGAGGAGGAGGCAGTGGAGGCGGAGGATCTGGCGGAGGATCTCTG | |
| | CAGATTACATGCCCTCCTCCAATGTCTGTGGAGCACGCCGATATTTGGGTG | |
| | AAGTCCTACAGCCTGTACAGCAGAGAGAGATACATCTGCAACAGCGGCTTT | |
| | AAGAGAAAGGCCGGCACCTCTTCTCTGACAGAGTGCGTGCTGAATAAGGCC | |
| | ACAAATGTGGCCCACTGGACAACACCTAGCCTGAAGTGCATTAGAGATCCT | |
| | GCCCTGGTCCACCAGAGGCCTGCCCCTCCATCTACAGTGACAACAGCCGGA | |
| | GTGACACCTCAGCCTGAATCTCTGAGCCCTTCTGGAAAAGAACCTGCCGCC | |
| | AGCTCTCCTAGCTCTAATAATACCGCCGCCACAACAGCCGCCATTGTGCCT | |
| | GGATCTCAGCTGATGCCTAGCAAGTCTCCTAGCACAGGCACAACAGAGATC | |
| | AGCAGCCACGAATCTTCTCACGGAACACCTTCTCAGACCACCGCCAAGAAT | |
| | TGGGAGCTGACAGCCTCTGCCTCTCACCAGCCTCCAGGAGTGTATCCTCAG | |
| | GGCCACTCTGATACAACAGTGGCCATCAGCACATCTACAGTGCTGCTGTGT | |
| | GGACTGTCTGCCGTGTCTCTGCTGGCCTGTTACCTGAAGTCTAGACAGACA | |
| | CCTCCTCTGGCCTCTGTGGAGATGGAGGCCATGGAAGCCCTGCCTGTGACA | |
| | TGGGGAACAAGCAGCAGAGATGAAGACCTGGAGAATTGTTCTCACCACCTG | |
| AP15 nucleotide | AACATCCAGAATCCCGAGCCTGCGGTGTACCAGCTGAAGGACCCCCGCTCT | |
| sequence | CAGGATAGCACACTGTGCCTGTTCACCGACTTTGATAGCCAGATCAACGTG | 256 |
| | CCTAAAACAATGGAGTCCGGCACCTTCATCACCGACAAGTGCGTGCTGGAT | |
| | ATGAAAGCGATGGACTCCAAGTCTAACGGCGCGATCGCGTGGTCCAATCAG | |
| | ACATCTTTCACCTGCCAGGATATCTTCAAGGAGACAAACGCGACCTATCCT | |
| | TCCTCTGACGTGCCATGTGATGCGACACTGACCGAGAAGAGCTTCGAGACA | |
| | GACATGAACCTGAATTTTCAGAATCTGCTGGTCATCGTGCTGAGAATCCTG | |
| | CTGCTGAAGGTGGCGGGCTTTAATCTGCTGATGACACTGCGGCTGTGGAGT | |
| | TCCCGGGCGAAACGCTCTGGAAGCGGAGCGACCAATTTCAGCCTGCTGAAG | |
| | CAGGCGGGCGATGTGGAGGAGAACCCTGGCCCAATGGATTGGACCTGGATT | |
| | CTGTTTCTGGTGGCCGCTGCCACAAGAGTGCACAGCAACTGGGTGAATGTG | |
| | ATCAGCGACCTGAAGAAGATCGAGGATCTGATCCAGAGCATGCACATTGAT | |
| | GCCACCCTGTACACAGAATCTGATGTGCACCCTAGCTGTAAAGTGACCGCC | |
| | ATGAAGTGTTTTCTGCTGGAGCTGCAGGTGATTTCTCTGGAAAGCGGAGAT | |
| | GCCTCTATCCACGACACAGTGGAGAATCTGATCATCCTGGCCAACAATAGC | |
| | CTGAGCAGCAATGGCAATGTGACAGAGTCTGGCTGTAAGGAGTGTGAGGAG | |
| | CTGGAGGAGAAGAACATCAAGGAGTTTCTGCAGAGCTTTGTGCACATCGTG | |
| | CAGATGTTCATCAATACAAGCTCTGGCGGAGGATCTGGAGGAGGCGGATCT | |
| | GGAGGAGGAGGCAGTGGAGGCGGAGGATCTGGCGGAGGATCTCTGCAGATT | |
| | ACATGCCCTCCTCCAATGTCTGTGGAGCACGCCGATATTTGGGTGAAGTCC | |
| | TACAGCCTGTACAGCAGAGAGAGATACATCTGCAACAGCGGCTTTAAGAGA | |
| | AAGGCCGGCACCTCTTCTCTGACAGAGTGCGTGCTGAATAAGGCCACAAAT | |
| | GTGGCCCACTGGACAACACCTAGCCTGAAGTGCATTAGAGATCCTGCCCTG | |
| | GTCCACCAGAGGCCTGCCCCTCCATCTACAGTGACAACAGCCGGAGTGACA | |
| | CCTCAGCCTGAATCTCTGAGCCCTTCTGGAAAAGAACCTGCCGCCAGCTCT | |
| | CCTAGCTCTAATAATACCGCCGCCACAACAGCCGCCATTGTGCCTGGATCT | |
| | CAGCTGATGCCTAGCAAGTCTCCTAGCACAGGCACAACAGAGATCAGCAGC | |
| | CACGAATCTTCTCACGGAACACCTTCTCAGACCACCGCCAAGAATTGGGAG | |
| | CTGACAGCCTCTGCCTCTCACCAGCCTCCAGGAGTGTATCCTCAGGGCCAC | |
| | TCTGATACAACAGTGGCCATCAGCACATCTACAGTGCTGCTGTGTGGACTG | |
| | TCTGCCGTGTCTCTGCTGGCCTGTTACCTGAAGTCTAGACAGACACCTCCT | |
| | CTGGCCTCTGTGGAGATGGAGGCCATGGAAGCCCTGCCTGTGACATGGGGA | |
| | ACAAGCAGCAGAGATGAAGACCTGGAGAATTGTTCTCACCACCTG | |
| AP15T nucleotide | AACATCCAGAATCCCGAGCCTGCGGTGTACCAGCTGAAGGACCCCCGCTCT | 258 |
| sequence | CAGGATAGCACACTGTGCCTGTTCACCGACTTTGATAGCCAGATCAACGTG | |
| | CCTAAAACAATGGAGTCCGGCACCTTCATCACCGACAAGTGCGTGCTGGAT | |
| | ATGAAAGCGATGGACTCCAAGTCTAACGGCGCGATCGCGTGGTCCAATCAG | |
| | ACATCTTTCACCTGCCAGGATATCTTCAAGGAGACAAACGCGACCTATCCT | |
| | TCCTCTGACGTGCCATGTGATGCGACACTGACCGAGAAGAGCTTCGAGACA | |
| | GACATGAACCTGAATTTTCAGAATCTGCTGGTCATCGTGCTGAGAATCCTG | |
| | CTGCTGAAGGTGGCGGGCTTTAATCTGCTGATGACACTGCGGCTGTGGAGT | |
| | TCCCGGGCGAAACGCTCTGGAAGCGGAGCGACCAATTTCAGCCTGCTGAAG | |
| | CAGGCGGGCGATGTGGAGGAGAACCCTGGCCCAATGGATTGGACCTGGATT | |
| | CTGTTTCTGGTGGCCGCTGCCACAAGAGTGCACAGCAACTGGGTGAATGTG | |
| | ATCAGCGACCTGAAGAAGATCGAGGATCTGATCCAGAGCATGCACATTGAT | |
| | GCCACCCTGTACACAGAATCTGATGTGCACCCTAGCTGTAAAGTGACCGCC | |
| | ATGAAGTGTTTTCTGCTGGAGCTGCAGGTGATTTCTCTGGAAAGCGGAGAT | |
| | GCCTCTATCCACGACACAGTGGAGAATCTGATCATCCTGGCCAACAATAGC | |
| | CTGAGCAGCAATGGCAATGTGACAGAGTCTGGCTGTAAGGAGTGTGAGGAG | |
| | CTGGAGGAGAAGAACATCAAGGAGTTTCTGCAGAGCTTTGTGCACATCGTG | |
| | CAGATGTTCATCAATACAAGCTCTGGCGGAGGATCTGGAGGAGGCGGATCT | |
| | GGAGGAGGAGGCAGTGGAGGCGGAGGATCTGGCGGAGGATCTCTGCAGATT | |
| | ACATGCCCTCCTCCAATGTCTGTGGAGCACGCCGATATTTGGGTGAAGTCC | |
| | TACAGCCTGTACAGCAGAGAGAGATACATCTGCAACAGCGGCTTTAAGAGA | |
| | AAGGCCGGCACCTCTTCTCTGACAGAGTGCGTGCTGAATAAGGCCACAAAT | |
| | GTGGCCCACTGGACAACACCTAGCCTGAAGTGCATTAGAGATCCTGCCCTG | |
| | GTCCACCAGAGGCCTGCCCCTCCATCTACAGTGACAACAGCCGGAGTGACA | |
| | CCTCAGCCTGAATCTCTGAGCCCTTCTGGAAAAGAACCTGCCGCCAGCTCT | |
| | CCTAGCTCTAATAATACCGCCGCCACAACAGCCGCCATTGTGCCTGGATCT | |
| | CAGCTGATGCCTAGCAAGTCTCCTAGCACAGGCACAACAGAGATCAGCAGC | |
| | CACGAATCTTCTCACGGAACACCTTCTCAGACCACCGCCAAGAATTGGGAG | |
| | CTGACAGCCTCTGCCTCTCACCAGCCTCCAGGAGTGTATCCTCAGGGCCAC | |
| | TCTGATACAACAGTGGCCATCAGCACATCTACAGTGCTGCTGTGTGGACTG | |
| | TCTGCCGTGTCTCTGCTGGCCTGTTACCTGAAGTCTAGACAGACACCTCCT | |
| | CTGGCCTCTGTGGAGATGGAGGCCATGGAAGCCCTGCCTGTGACATGGGGA | |
| | ACAAGCAGCAGAGATGAAGACCTGGAGAATTGTTCTCACCACCTGCGGGCG | |
| | AAACGCTCTGGAAGCGGAGAGGGCAGAGGAAGTCTTCTAACATGCGGTGAC | |
| | GTGGAGGAGAATCCCGGCCCT | |
| AT15 nucleotide | AACATCCAGAATCCCGAGCCTGCGGTGTACCAGCTGAAGGACCCCCGCTCT | 259 |
| sequence | CAGGATAGCACACTGTGCCTGTTCACCGACTTTGATAGCCAGATCAACGTG | |
| | CCTAAAACAATGGAGTCCGGCACCTTCATCACCGACAAGTGCGTGCTGGAT | |
| | ATGAAAGCGATGGACTCCAAGTCTAACGGCGCGATCGCGTGGTCCAATCAG | |
| | ACATCTTTCACCTGCCAGGATATCTTCAAGGAGACAAACGCGACCTATCCT | |
| | TCCTCTGACGTGCCATGTGATGCGACACTGACCGAGAAGAGCTTCGAGACA | |
| | GACATGAACCTGAATTTTCAGAATCTGCTGGTCATCGTGCTGAGAATCCTG | |
| | CTGCTGAAGGTGGCGGGCTTTAATCTGCTGATGACACTGCGGCTGTGGAGT | |
| | TCCCGGGCGAAACGCTCTGGAAGCGGAGAGGGCAGAGGAAGTCTTCTAACA | |
| | TGCGGTGACGTGGAGGAGAATCCCGGCCCTATGGATTGGACCTGGATTCTG | |
| | TTTCTGGTGGCCGCTGCCACAAGAGTGCACAGCAACTGGGTGAATGTGATC | |
| | AGCGACCTGAAGAAGATCGAGGATCTGATCCAGAGCATGCACATTGATGCC | |
| | ACCCTGTACACAGAATCTGATGTGCACCCTAGCTGTAAAGTGACCGCCATG | |
| | AAGTGTTTTCTGCTGGAGCTGCAGGTGATTTCTCTGGAAAGCGGAGATGCC | |
| | TCTATCCACGACACAGTGGAGAATCTGATCATCCTGGCCAACAATAGCCTG | |
| | AGCAGCAATGGCAATGTGACAGAGTCTGGCTGTAAGGAGTGTGAGGAGCTG | |
| | GAGGAGAAGAACATCAAGGAGTTTCTGCAGAGCTTTGTGCACATCGTGCAG | |
| | ATGTTCATCAATACAAGCTCTGGCGGAGGATCTGGAGGAGGCGGATCTGGA | |
| | GGAGGAGGCAGTGGAGGCGGAGGATCTGGCGGAGGATCTCTGCAGATTACA | |
| | TGCCCTCCTCCAATGTCTGTGGAGCACGCCGATATTTGGGTGAAGTCCTAC | |
| | AGCCTGTACAGCAGAGAGAGATACATCTGCAACAGCGGCTTTAAGAGAAAG | |
| | GCCGGCACCTCTTCTCTGACAGAGTGCGTGCTGAATAAGGCCACAAATGTG | |
| | GCCCACTGGACAACACCTAGCCTGAAGTGCATTAGAGATCCTGCCCTGGTC | |
| | CACCAGAGGCCTGCCCCTCCATCTACAGTGACAACAGCCGGAGTGACACCT | |
| | CAGCCTGAATCTCTGAGCCCTTCTGGAAAAGAACCTGCCGCCAGCTCTCCT | |
| | AGCTCTAATAATACCGCCGCCACAACAGCCGCCATTGTGCCTGGATCTCAG | |
| | CTGATGCCTAGCAAGTCTCCTAGCACAGGCACAACAGAGATCAGCAGCCAC | |
| | GAATCTTCTCACGGAACACCTTCTCAGACCACCGCCAAGAATTGGGAGCTG | |
| | ACAGCCTCTGCCTCTCACCAGCCTCCAGGAGTGTATCCTCAGGGCCACTCT | |
| | GATACAACAGTGGCCATCAGCACATCTACAGTGCTGCTGTGTGGACTGTCT | |
| | GCCGTGTCTCTGCTGGCCTGTTACCTGAAGTCTAGACAGACACCTCCTCTG | |
| | GCCTCTGTGGAGATGGAGGCCATGGAAGCCCTGCCTGTGACATGGGGAACA | |
| | AGCAGCAGAGATGAAGACCTGGAGAATTGTTCTCACCACCTG | |
| AT15P nucleotide | AACATCCAGAATCCCGAGCCTGCGGTGTACCAGCTGAAGGACCCCCGCTCT | 261 |
| sequence | CAGGATAGCACACTGTGCCTGTTCACCGACTTTGATAGCCAGATCAACGTG | |
| | CCTAAAACAATGGAGTCCGGCACCTTCATCACCGACAAGTGCGTGCTGGAT | |
| | ATGAAAGCGATGGACTCCAAGTCTAACGGCGCGATCGCGTGGTCCAATCAG | |
| | ACATCTTTCACCTGCCAGGATATCTTCAAGGAGACAAACGCGACCTATCCT | |
| | TCCTCTGACGTGCCATGTGATGCGACACTGACCGAGAAGAGCTTCGAGACA | |
| | GACATGAACCTGAATTTTCAGAATCTGCTGGTCATCGTGCTGAGAATCCTG | |
| | CTGCTGAAGGTGGCGGGCTTTAATCTGCTGATGACACTGCGGCTGTGGAGT | |
| | TCCCGGGCGAAACGCTCTGGAAGCGGAGAGGGCAGAGGAAGTCTTCTAACA | |
| | TGCGGTGACGTGGAGGAGAATCCCGGCCCTATGGATTGGACCTGGATTCTG | |
| | TTTCTGGTGGCCGCTGCCACAAGAGTGCACAGCAACTGGGTGAATGTGATC | |
| | AGCGACCTGAAGAAGATCGAGGATCTGATCCAGAGCATGCACATTGATGCC | |
| | ACCCTGTACACAGAATCTGATGTGCACCCTAGCTGTAAAGTGACCGCCATG | |
| | AAGTGTTTTCTGCTGGAGCTGCAGGTGATTTCTCTGGAAAGCGGAGATGCC | |
| | TCTATCCACGACACAGTGGAGAATCTGATCATCCTGGCCAACAATAGCCTG | |
| | AGCAGCAATGGCAATGTGACAGAGTCTGGCTGTAAGGAGTGTGAGGAGCTG | |
| | GAGGAGAAGAACATCAAGGAGTTTCTGCAGAGCTTTGTGCACATCGTGCAG | |
| | ATGTTCATCAATACAAGCTCTGGCGGAGGATCTGGAGGAGGCGGATCTGGA | |
| | GGAGGAGGCAGTGGAGGCGGAGGATCTGGCGGAGGATCTCTGCAGATTACA | |
| | TGCCCTCCTCCAATGTCTGTGGAGCACGCCGATATTTGGGTGAAGTCCTAC | |
| | AGCCTGTACAGCAGAGAGAGATACATCTGCAACAGCGGCTTTAAGAGAAAG | |
| | GCCGGCACCTCTTCTCTGACAGAGTGCGTGCTGAATAAGGCCACAAATGTG | |
| | GCCCACTGGACAACACCTAGCCTGAAGTGCATTAGAGATCCTGCCCTGGTC | |
| | CACCAGAGGCCTGCCCCTCCATCTACAGTGACAACAGCCGGAGTGACACCT | |
| | CAGCCTGAATCTCTGAGCCCTTCTGGAAAAGAACCTGCCGCCAGCTCTCCT | |
| | AGCTCTAATAATACCGCCGCCACAACAGCCGCCATTGTGCCTGGATCTCAG | |
| | CTGATGCCTAGCAAGTCTCCTAGCACAGGCACAACAGAGATCAGCAGCCAC | |
| | GAATCTTCTCACGGAACACCTTCTCAGACCACCGCCAAGAATTGGGAGCTG | |
| | ACAGCCTCTGCCTCTCACCAGCCTCCAGGAGTGTATCCTCAGGGCCACTCT | |
| | GATACAACAGTGGCCATCAGCACATCTACAGTGCTGCTGTGTGGACTGTCT | |
| | GCCGTGTCTCTGCTGGCCTGTTACCTGAAGTCTAGACAGACACCTCCTCTG | |
| | GCCTCTGTGGAGATGGAGGCCATGGAAGCCCTGCCTGTGACATGGGGAACA | |
| | AGCAGCAGAGATGAAGACCTGGAGAATTGTTCTCACCACCTGCGGGCGAAA | |
| | CGCTCTGGAAGCGGAGCGACCAATTTCAGCCTGCTGAAGCAGGCGGGCGAT | |
| | GTGGAGGAGAACCCTGGCCCA | |
| BP15T nucleotide | GAGGACCTGAGGAACGTGACCCCACCTAAAGTGAGCCTGTTCGAGCCATCC | 262 |
| sequence | AAGGCGGAGATCGCGAATAAGCAGAAAGCGACCCTGGTGTGCCTGGCGAGG | |
| | GGCTTCTTTCCCGATCACGTGGAGCTGTCCTGGTGGGTGAACGGCAAAGAG | |
| | GTGCACTCTGGCGTGTGCACAGACCCTCAGGCGTACAAGGAGAGCAATTAC | |
| | TCCTATTGTCTGTCTAGCAGACTGAGGGTGAGCGCGACCTTTTGGCACAAC | |
| | CCCCGGAATCACTTCCGCTGCCAGGTGCAGTTTCACGGCCTGTCCGAGGAG | |
| | GATAAATGGCCTGAGGGCTCTCCAAAGCCCGTGACACAGAATATCAGCGCG | |
| | GAGGCGTGGGGAAGAGCGGACTGTGGCATTACAAGCGCGTCCTATCAGCAG | |
| | GGCGTGCTGTCCGCGACCATCCTGTACGAGATTCTGCTGGGCAAGGCGACA | |
| | CTGTATGCGGTGCTGGTGTCCACCCTGGTGGTCATGGCGATGGTGAAGAGG | |
| | AAAAACTCTCGGGCGAAACGCTCTGGAAGCGGAGCGACCAATTTCAGCCTG | |
| | CTGAAGCAGGCGGGCGATGTGGAGGAGAACCCTGGCCCAATGGATTGGACC | |
| | TGGATTCTGTTTCTGGTGGCCGCTGCCACAAGAGTGCACAGCAACTGGGTG | |
| | AATGTGATCAGCGACCTGAAGAAGATCGAGGATCTGATCCAGAGCATGCAC | |
| | ATTGATGCCACCCTGTACACAGAATCTGATGTGCACCCTAGCTGTAAAGTG | |
| | ACCGCCATGAAGTGTTTTCTGCTGGAGCTGCAGGTGATTTCTCTGGAAAGC | |
| | GGAGATGCCTCTATCCACGACACAGTGGAGAATCTGATCATCCTGGCCAAC | |
| | AATAGCCTGAGCAGCAATGGCAATGTGACAGAGTCTGGCTGTAAGGAGTGT | |
| | GAGGAGCTGGAGGAGAAGAACATCAAGGAGTTTCTGCAGAGCTTTGTGCAC | |
| | ATCGTGCAGATGTTCATCAATACAAGCTCTGGCGGAGGATCTGGAGGAGGC | |
| | GGATCTGGAGGAGGAGGCAGTGGAGGCGGAGGATCTGGCGGAGGATCTCTG | |
| | CAGATTACATGCCCTCCTCCAATGTCTGTGGAGCACGCCGATATTTGGGTG | |
| | AAGTCCTACAGCCTGTACAGCAGAGAGAGATACATCTGCAACAGCGGCTTT | |
| | AAGAGAAAGGCCGGCACCTCTTCTCTGACAGAGTGCGTGCTGAATAAGGCC | |
| | ACAAATGTGGCCCACTGGACAACACCTAGCCTGAAGTGCATTAGAGATCCT | |
| | GCCCTGGTCCACCAGAGGCCTGCCCCTCCATCTACAGTGACAACAGCCGGA | |
| | GTGACACCTCAGCCTGAATCTCTGAGCCCTTCTGGAAAAGAACCTGCCGCC | |
| | AGCTCTCCTAGCTCTAATAATACCGCCGCCACAACAGCCGCCATTGTGCCT | |
| | GGATCTCAGCTGATGCCTAGCAAGTCTCCTAGCACAGGCACAACAGAGATC | |
| | AGCAGCCACGAATCTTCTCACGGAACACCTTCTCAGACCACCGCCAAGAAT | |
| | TGGGAGCTGACAGCCTCTGCCTCTCACCAGCCTCCAGGAGTGTATCCTCAG | |
| | GGCCACTCTGATACAACAGTGGCCATCAGCACATCTACAGTGCTGCTGTGT | |
| | GGACTGTCTGCCGTGTCTCTGCTGGCCTGTTACCTGAAGTCTAGACAGACA | |
| | CCTCCTCTGGCCTCTGTGGAGATGGAGGCCATGGAAGCCCTGCCTGTGACA | |
| | TGGGGAACAAGCAGCAGAGATGAAGACCTGGAGAATTGTTCTCACCACCTG | |
| | CGGGCGAAACGCTCTGGAAGCGGAGAGGGCAGAGGAAGTCTTCTAACATGC | |
| | GGTGACGTGGAGGAGAATCCCGGCCCT | |
| BT15P nucleotide | GAGGACCTGAGGAACGTGACCCCACCTAAAGTGAGCCTGTTCGAGCCATCC | 263 |
| sequence | AAGGCGGAGATCGCGAATAAGCAGAAAGCGACCCTGGTGTGCCTGGCGAGG | |
| | GGCTTCTTTCCCGATCACGTGGAGCTGTCCTGGTGGGTGAACGGCAAAGAG | |
| | GTGCACTCTGGCGTGTGCACAGACCCTCAGGCGTACAAGGAGAGCAATTAC | |
| | TCCTATTGTCTGTCTAGCAGACTGAGGGTGAGCGCGACCTTTTGGCACAAC | |
| | CCCCGGAATCACTTCCGCTGCCAGGTGCAGTTTCACGGCCTGTCCGAGGAG | |
| | GATAAATGGCCTGAGGGCTCTCCAAAGCCCGTGACACAGAATATCAGCGCG | |
| | GAGGCGTGGGGAAGAGCGGACTGTGGCATTACAAGCGCGTCCTATCAGCAG | |
| | GGCGTGCTGTCCGCGACCATCCTGTACGAGATTCTGCTGGGCAAGGCGACA | |
| | CTGTATGCGGTGCTGGTGTCCACCCTGGTGGTCATGGCGATGGTGAAGAGG | |
| | AAAAACTCTCGGGCGAAACGCTCTGGAAGCGGAGAGGGCAGAGGAAGTCTT | |
| | CTAACATGCGGTGACGTGGAGGAGAATCCCGGCCCTATGGATTGGACCTGG | |
| | ATTCTGTTTCTGGTGGCCGCTGCCACAAGAGTGCACAGCAACTGGGTGAAT | |
| | GTGATCAGCGACCTGAAGAAGATCGAGGATCTGATCCAGAGCATGCACATT | |
| | GATGCCACCCTGTACACAGAATCTGATGTGCACCCTAGCTGTAAAGTGACC | |
| | GCCATGAAGTGTTTTCTGCTGGAGCTGCAGGTGATTTCTCTGGAAAGCGGA | |
| | GATGCCTCTATCCACGACACAGTGGAGAATCTGATCATCCTGGCCAACAAT | |
| | AGCCTGAGCAGCAATGGCAATGTGACAGAGTCTGGCTGTAAGGAGTGTGAG | |
| | GAGCTGGAGGAGAAGAACATCAAGGAGTTTCTGCAGAGCTTTGTGCACATC | |
| | GTGCAGATGTTCATCAATACAAGCTCTGGCGGAGGATCTGGAGGAGGCGGA | |
| | TCTGGAGGAGGAGGCAGTGGAGGCGGAGGATCTGGCGGAGGATCTCTGCAG | |
| | ATTACATGCCCTCCTCCAATGTCTGTGGAGCACGCCGATATTTGGGTGAAG | |
| | TCCTACAGCCTGTACAGCAGAGAGAGATACATCTGCAACAGCGGCTTTAAG | |
| | AGAAAGGCCGGCACCTCTTCTCTGACAGAGTGCGTGCTGAATAAGGCCACA | |
| | AATGTGGCCCACTGGACAACACCTAGCCTGAAGTGCATTAGAGATCCTGCC | |
| | CTGGTCCACCAGAGGCCTGCCCCTCCATCTACAGTGACAACAGCCGGAGTG | |
| | ACACCTCAGCCTGAATCTCTGAGCCCTTCTGGAAAAGAACCTGCCGCCAGC | |
| | TCTCCTAGCTCTAATAATACCGCCGCCACAACAGCCGCCATTGTGCCTGGA | |
| | TCTCAGCTGATGCCTAGCAAGTCTCCTAGCACAGGCACAACAGAGATCAGC | |
| | AGCCACGAATCTTCTCACGGAACACCTTCTCAGACCACCGCCAAGAATTGG | |
| | GAGCTGACAGCCTCTGCCTCTCACCAGCCTCCAGGAGTGTATCCTCAGGGC | |
| | CACTCTGATACAACAGTGGCCATCAGCACATCTACAGTGCTGCTGTGTGGA | |
| | CTGTCTGCCGTGTCTCTGCTGGCCTGTTACCTGAAGTCTAGACAGACACCT | |
| | CCTCTGGCCTCTGTGGAGATGGAGGCCATGGAAGCCCTGCCTGTGACATGG | |
| | GGAACAAGCAGCAGAGATGAAGACCTGGAGAATTGTTCTCACCACCTGCGG | |
| | GCGAAACGCTCTGGAAGCGGAGCGACCAATTTCAGCCTGCTGAAGCAGGCG | |
| | GGCGATGTGGAGGAGAACCCTGGCCCA | |

TABLE 11C
Exemplary polynucleotide sequences for use in polycistronic expression
cassette.

| | | SEQ ID |
|---|---|---|
| Description | Sequence | NO: |
| AP nucleotide | AACATCCAGAATCCCGAGCCTGCGGTGTACCAGCTGAAGGACCCCCGCTCT | 270 |
| sequence | CAGGATAGCACACTGTGCCTGTTCACCGACTTTGATAGCCAGATCAACGTG | |
| | CCTAAAACAATGGAGTCCGGCACCTTCATCACCGACAAGACCGTGCTGGAT | |
| | ATGAAAGCGATGGACTCCAAGTCTAACGGCGCGATCGCGTGGTCCAATCAG | |
| | ACATCTTTCACCTGCCAGGATATCTTCAAGGAGACAAACGCGACCTATCCT | |
| | TCCTCTGACGTGCCATGTGATGCGACACTGACCGAGAAGAGCTTCGAGACA | |
| | GACATGAACCTGAATTTTCAGAATCTGCTGGTCATCGTGCTGAGAATCCTG | |
| | CTGCTGAAGGTGGCGGGCTTTAATCTGCTGATGACACTGCGGCTGTGGAGT | |
| | TCCCGGGCGAAACGCTCTGGAAGCGGAGCGACCAATTTCAGCCTGCTGAAG | |
| | CAGGCGGGCGATGTGGAGGAGAACCCTGGCCCA | |
| AT nucleotide | AACATCCAGAATCCCGAGCCTGCGGTGTACCAGCTGAAGGACCCCCGCTCT | 273 |
| sequence | CAGGATAGCACACTGTGCCTGTTCACCGACTTTGATAGCCAGATCAACGTG | |
| | CCTAAAACAATGGAGTCCGGCACCTTCATCACCGACAAGACCGTGCTGGAT | |
| | ATGAAAGCGATGGACTCCAAGTCTAACGGCGCGATCGCGTGGTCCAATCAG | |
| | ACATCTTTCACCTGCCAGGATATCTTCAAGGAGACAAACGCGACCTATCCT | |
| | TCCTCTGACGTGCCATGTGATGCGACACTGACCGAGAAGAGCTTCGAGACA | |
| | GACATGAACCTGAATTTTCAGAATCTGCTGGTCATCGTGCTGAGAATCCTG | |
| | CTGCTGAAGGTGGCGGGCTTTAATCTGCTGATGACACTGCGGCTGTGGAGT | |
| | TCCCGGGCGAAACGCTCTGGAAGCGGAGAGGGCAGAGGAAGTCTTCTAACA | |
| | TGCGGTGACGTGGAGGAGAATCCCGGCCCT | |
| AP15 nucleotide | AACATCCAGAATCCCGAGCCTGCGGTGTACCAGCTGAAGGACCCCCGCTCT | 276 |
| sequence | CAGGATAGCACACTGTGCCTGTTCACCGACTTTGATAGCCAGATCAACGTG | |
| | CCTAAAACAATGGAGTCCGGCACCTTCATCACCGACAAGACCGTGCTGGAT | |
| | ATGAAAGCGATGGACTCCAAGTCTAACGGCGCGATCGCGTGGTCCAATCAG | |
| | ACATCTTTCACCTGCCAGGATATCTTCAAGGAGACAAACGCGACCTATCCT | |
| | TCCTCTGACGTGCCATGTGATGCGACACTGACCGAGAAGAGCTTCGAGACA | |
| | GACATGAACCTGAATTTTCAGAATCTGCTGGTCATCGTGCTGAGAATCCTG | |
| | CTGCTGAAGGTGGCGGGCTTTAATCTGCTGATGACACTGCGGCTGTGGAGT | |
| | TCCCGGGCGAAACGCTCTGGAAGCGGAGCGACCAATTTCAGCCTGCTGAAG | |
| | CAGGCGGGCGATGTGGAGGAGAACCCTGGCCCAATGGATTGGACCTGGATT | |
| | CTGTTTCTGGTGGCCGCTGCCACAAGAGTGCACAGCAACTGGGTGAATGTG | |
| | ATCAGCGACCTGAAGAAGATCGAGGATCTGATCCAGAGCATGCACATTGAT | |
| | GCCACCCTGTACACAGAATCTGATGTGCACCCTAGCTGTAAAGTGACCGCC | |
| | ATGAAGTGTTTTCTGCTGGAGCTGCAGGTGATTTCTCTGGAAAGCGGAGAT | |
| | GCCTCTATCCACGACACAGTGGAGAATCTGATCATCCTGGCCAACAATAGC | |
| | CTGAGCAGCAATGGCAATGTGACAGAGTCTGGCTGTAAGGAGTGTGAGGAG | |
| | CTGGAGGAGAAGAACATCAAGGAGTTTCTGCAGAGCTTTGTGCACATCGTG | |
| | CAGATGTTCATCAATACAAGCTCTGGCGGAGGATCTGGAGGAGGCGGATCT | |
| | GGAGGAGGAGGCAGTGGAGGCGGAGGATCTGGCGGAGGATCTCTGCAGATT | |
| | ACATGCCCTCCTCCAATGTCTGTGGAGCACGCCGATATTTGGGTGAAGTCC | |
| | TACAGCCTGTACAGCAGAGAGAGATACATCTGCAACAGCGGCTTTAAGAGA | |
| | AAGGCCGGCACCTCTTCTCTGACAGAGTGCGTGCTGAATAAGGCCACAAAT | |
| | GTGGCCCACTGGACAACACCTAGCCTGAAGTGCATTAGAGATCCTGCCCTG | |
| | GTCCACCAGAGGCCTGCCCCTCCATCTACAGTGACAACAGCCGGAGTGACA | |
| | CCTCAGCCTGAATCTCTGAGCCCTTCTGGAAAAGAACCTGCCGCCAGCTCT | |
| | CCTAGCTCTAATAATACCGCCGCCACAACAGCCGCCATTGTGCCTGGATCT | |
| | CAGCTGATGCCTAGCAAGTCTCCTAGCACAGGCACAACAGAGATCAGCAGC | |
| | CACGAATCTTCTCACGGAACACCTTCTCAGACCACCGCCAAGAATTGGGAG | |
| | CTGACAGCCTCTGCCTCTCACCAGCCTCCAGGAGTGTATCCTCAGGGCCAC | |
| | TCTGATACAACAGTGGCCATCAGCACATCTACAGTGCTGCTGTGTGGACTG | |
| | TCTGCCGTGTCTCTGCTGGCCTGTTACCTGAAGTCTAGACAGACACCTCCT | |
| | CTGGCCTCTGTGGAGATGGAGGCCATGGAAGCCCTGCCTGTGACATGGGGA | |
| | ACAAGCAGCAGAGATGAAGACCTGGAGAATTGTTCTCACCACCTG | |
| AP15T nucleotide | AACATCCAGAATCCCGAGCCTGCGGTGTACCAGCTGAAGGACCCCCGCTCT | 278 |
| sequence | CAGGATAGCACACTGTGCCTGTTCACCGACTTTGATAGCCAGATCAACGTG | |
| | CCTAAAACAATGGAGTCCGGCACCTTCATCACCGACAAGACCGTGCTGGAT | |
| | ATGAAAGCGATGGACTCCAAGTCTAACGGCGCGATCGCGTGGTCCAATCAG | |
| | ACATCTTTCACCTGCCAGGATATCTTCAAGGAGACAAACGCGACCTATCCT | |
| | TCCTCTGACGTGCCATGTGATGCGACACTGACCGAGAAGAGCTTCGAGACA | |
| | GACATGAACCTGAATTTTCAGAATCTGCTGGTCATCGTGCTGAGAATCCTG | |
| | CTGCTGAAGGTGGCGGGCTTTAATCTGCTGATGACACTGCGGCTGTGGAGT | |
| | TCCCGGGCGAAACGCTCTGGAAGCGGAGCGACCAATTTCAGCCTGCTGAAG | |
| | CAGGCGGGCGATGTGGAGGAGAACCCTGGCCCAATGGATTGGACCTGGATT | |
| | CTGTTTCTGGTGGCCGCTGCCACAAGAGTGCACAGCAACTGGGTGAATGTG | |
| | ATCAGCGACCTGAAGAAGATCGAGGATCTGATCCAGAGCATGCACATTGAT | |
| | GCCACCCTGTACACAGAATCTGATGTGCACCCTAGCTGTAAAGTGACCGCC | |
| | ATGAAGTGTTTTCTGCTGGAGCTGCAGGTGATTTCTCTGGAAAGCGGAGAT | |
| | GCCTCTATCCACGACACAGTGGAGAATCTGATCATCCTGGCCAACAATAGC | |
| | CTGAGCAGCAATGGCAATGTGACAGAGTCTGGCTGTAAGGAGTGTGAGGAG | |
| | CTGGAGGAGAAGAACATCAAGGAGTTTCTGCAGAGCTTTGTGCACATCGTG | |
| | CAGATGTTCATCAATACAAGCTCTGGCGGAGGATCTGGAGGAGGCGGATCT | |
| | GGAGGAGGAGGCAGTGGAGGCGGAGGATCTGGCGGAGGATCTCTGCAGATT | |
| | ACATGCCCTCCTCCAATGTCTGTGGAGCACGCCGATATTTGGGTGAAGTCC | |
| | TACAGCCTGTACAGCAGAGAGAGATACATCTGCAACAGCGGCTTTAAGAGA | |
| | AAGGCCGGCACCTCTTCTCTGACAGAGTGCGTGCTGAATAAGGCCACAAAT | |
| | GTGGCCCACTGGACAACACCTAGCCTGAAGTGCATTAGAGATCCTGCCCTG | |
| | GTCCACCAGAGGCCTGCCCCTCCATCTACAGTGACAACAGCCGGAGTGACA | |
| | CCTCAGCCTGAATCTCTGAGCCCTTCTGGAAAAGAACCTGCCGCCAGCTCT | |
| | CCTAGCTCTAATAATACCGCCGCCACAACAGCCGCCATTGTGCCTGGATCT | |
| | CAGCTGATGCCTAGCAAGTCTCCTAGCACAGGCACAACAGAGATCAGCAGC | |
| | CACGAATCTTCTCACGGAACACCTTCTCAGACCACCGCCAAGAATTGGGAG | |
| | CTGACAGCCTCTGCCTCTCACCAGCCTCCAGGAGTGTATCCTCAGGGCCAC | |
| | TCTGATACAACAGTGGCCATCAGCACATCTACAGTGCTGCTGTGTGGACTG | |
| | TCTGCCGTGTCTCTGCTGGCCTGTTACCTGAAGTCTAGACAGACACCTCCT | |
| | CTGGCCTCTGTGGAGATGGAGGCCATGGAAGCCCTGCCTGTGACATGGGGA | |
| | ACAAGCAGCAGAGATGAAGACCTGGAGAATTGTTCTCACCACCTGCGGGCG | |
| | AAACGCTCTGGAAGCGGAGAGGGCAGAGGAAGTCTTCTAACATGCGGTGAC | |
| | GTGGAGGAGAATCCCGGCCCT | |
| AT15 nucleotide | AACATCCAGAATCCCGAGCCTGCGGTGTACCAGCTGAAGGACCCCCGCTCT | 279 |
| sequence | CAGGATAGCACACTGTGCCTGTTCACCGACTTTGATAGCCAGATCAACGTG | |
| | CCTAAAACAATGGAGTCCGGCACCTTCATCACCGACAAGACCGTGCTGGAT | |
| | ATGAAAGCGATGGACTCCAAGTCTAACGGCGCGATCGCGTGGTCCAATCAG | |
| | ACATCTTTCACCTGCCAGGATATCTTCAAGGAGACAAACGCGACCTATCCT | |
| | TCCTCTGACGTGCCATGTGATGCGACACTGACCGAGAAGAGCTTCGAGACA | |
| | GACATGAACCTGAATTTTCAGAATCTGCTGGTCATCGTGCTGAGAATCCTG | |
| | CTGCTGAAGGTGGCGGGCTTTAATCTGCTGATGACACTGCGGCTGTGGAGT | |
| | TCCCGGGCGAAACGCTCTGGAAGCGGAGAGGGCAGAGGAAGTCTTCTAACA | |
| | TGCGGTGACGTGGAGGAGAATCCCGGCCCTATGGATTGGACCTGGATTCTG | |
| | TTTCTGGTGGCCGCTGCCACAAGAGTGCACAGCAACTGGGTGAATGTGATC | |
| | AGCGACCTGAAGAAGATCGAGGATCTGATCCAGAGCATGCACATTGATGCC | |
| | ACCCTGTACACAGAATCTGATGTGCACCCTAGCTGTAAAGTGACCGCCATG | |
| | AAGTGTTTTCTGCTGGAGCTGCAGGTGATTTCTCTGGAAAGCGGAGATGCC | |
| | TCTATCCACGACACAGTGGAGAATCTGATCATCCTGGCCAACAATAGCCTG | |
| | AGCAGCAATGGCAATGTGACAGAGTCTGGCTGTAAGGAGTGTGAGGAGCTG | |
| | GAGGAGAAGAACATCAAGGAGTTTCTGCAGAGCTTTGTGCACATCGTGCAG | |
| | ATGTTCATCAATACAAGCTCTGGCGGAGGATCTGGAGGAGGCGGATCTGGA | |
| | GGAGGAGGCAGTGGAGGCGGAGGATCTGGCGGAGGATCTCTGCAGATTACA | |
| | TGCCCTCCTCCAATGTCTGTGGAGCACGCCGATATTTGGGTGAAGTCCTAC | |
| | AGCCTGTACAGCAGAGAGAGATACATCTGCAACAGCGGCTTTAAGAGAAAG | |
| | GCCGGCACCTCTTCTCTGACAGAGTGCGTGCTGAATAAGGCCACAAATGTG | |
| | GCCCACTGGACAACACCTAGCCTGAAGTGCATTAGAGATCCTGCCCTGGTC | |
| | CACCAGAGGCCTGCCCCTCCATCTACAGTGACAACAGCCGGAGTGACACCT | |
| | CAGCCTGAATCTCTGAGCCCTTCTGGAAAAGAACCTGCCGCCAGCTCTCCT | |
| | AGCTCTAATAATACCGCCGCCACAACAGCCGCCATTGTGCCTGGATCTCAG | |
| | CTGATGCCTAGCAAGTCTCCTAGCACAGGCACAACAGAGATCAGCAGCCAC | |
| | GAATCTTCTCACGGAACACCTTCTCAGACCACCGCCAAGAATTGGGAGCTG | |
| | ACAGCCTCTGCCTCTCACCAGCCTCCAGGAGTGTATCCTCAGGGCCACTCT | |
| | GATACAACAGTGGCCATCAGCACATCTACAGTGCTGCTGTGTGGACTGTCT | |
| | GCCGTGTCTCTGCTGGCCTGTTACCTGAAGTCTAGACAGACACCTCCTCTG | |
| | GCCTCTGTGGAGATGGAGGCCATGGAAGCCCTGCCTGTGACATGGGGAACA | |
| | AGCAGCAGAGATGAAGACCTGGAGAATTGTTCTCACCACCTG | |
| AT15P nucleotide | AACATCCAGAATCCCGAGCCTGCGGTGTACCAGCTGAAGGACCCCCGCTCT | 281 |
| sequence | CAGGATAGCACACTGTGCCTGTTCACCGACTTTGATAGCCAGATCAACGTG | |
| | CCTAAAACAATGGAGTCCGGCACCTTCATCACCGACAAGACCGTGCTGGAT | |
| | ATGAAAGCGATGGACTCCAAGTCTAACGGCGCGATCGCGTGGTCCAATCAG | |
| | ACATCTTTCACCTGCCAGGATATCTTCAAGGAGACAAACGCGACCTATCCT | |
| | TCCTCTGACGTGCCATGTGATGCGACACTGACCGAGAAGAGCTTCGAGACA | |
| | GACATGAACCTGAATTTTCAGAATCTGCTGGTCATCGTGCTGAGAATCCTG | |
| | CTGCTGAAGGTGGCGGGCTTTAATCTGCTGATGACACTGCGGCTGTGGAGT | |
| | TCCCGGGCGAAACGCTCTGGAAGCGGAGAGGGCAGAGGAAGTCTTCTAACA | |
| | TGCGGTGACGTGGAGGAGAATCCCGGCCCTATGGATTGGACCTGGATTCTG | |
| | TTTCTGGTGGCCGCTGCCACAAGAGTGCACAGCAACTGGGTGAATGTGATC | |
| | AGCGACCTGAAGAAGATCGAGGATCTGATCCAGAGCATGCACATTGATGCC | |
| | ACCCTGTACACAGAATCTGATGTGCACCCTAGCTGTAAAGTGACCGCCATG | |
| | AAGTGTTTTCTGCTGGAGCTGCAGGTGATTTCTCTGGAAAGCGGAGATGCC | |
| | TCTATCCACGACACAGTGGAGAATCTGATCATCCTGGCCAACAATAGCCTG | |
| | AGCAGCAATGGCAATGTGACAGAGTCTGGCTGTAAGGAGTGTGAGGAGCTG | |
| | GAGGAGAAGAACATCAAGGAGTTTCTGCAGAGCTTTGTGCACATCGTGCAG | |
| | ATGTTCATCAATACAAGCTCTGGCGGAGGATCTGGAGGAGGCGGATCTGGA | |
| | GGAGGAGGCAGTGGAGGCGGAGGATCTGGCGGAGGATCTCTGCAGATTACA | |
| | TGCCCTCCTCCAATGTCTGTGGAGCACGCCGATATTTGGGTGAAGTCCTAC | |
| | AGCCTGTACAGCAGAGAGAGATACATCTGCAACAGCGGCTTTAAGAGAAAG | |
| | GCCGGCACCTCTTCTCTGACAGAGTGCGTGCTGAATAAGGCCACAAATGTG | |
| | GCCCACTGGACAACACCTAGCCTGAAGTGCATTAGAGATCCTGCCCTGGTC | |
| | CACCAGAGGCCTGCCCCTCCATCTACAGTGACAACAGCCGGAGTGACACCT | |
| | CAGCCTGAATCTCTGAGCCCTTCTGGAAAAGAACCTGCCGCCAGCTCTCCT | |
| | AGCTCTAATAATACCGCCGCCACAACAGCCGCCATTGTGCCTGGATCTCAG | |
| | CTGATGCCTAGCAAGTCTCCTAGCACAGGCACAACAGAGATCAGCAGCCAC | |
| | GAATCTTCTCACGGAACACCTTCTCAGACCACCGCCAAGAATTGGGAGCTG | |
| | ACAGCCTCTGCCTCTCACCAGCCTCCAGGAGTGTATCCTCAGGGCCACTCT | |
| | GATACAACAGTGGCCATCAGCACATCTACAGTGCTGCTGTGTGGACTGTCT | |
| | GCCGTGTCTCTGCTGGCCTGTTACCTGAAGTCTAGACAGACACCTCCTCTG | |
| | GCCTCTGTGGAGATGGAGGCCATGGAAGCCCTGCCTGTGACATGGGGAACA | |
| | AGCAGCAGAGATGAAGACCTGGAGAATTGTTCTCACCACCTGCGGGCGAAA | |
| | CGCTCTGGAAGCGGAGCGACCAATTTCAGCCTGCTGAAGCAGGCGGGCGAT | |
| | GTGGAGGAGAACCCTGGCCCA | |

### 1.6 Transposon and Transposase Systems

[0288] In some embodiments, transgenes of the recombinant vector are introduced into an immune effector cell via synthetic DNA transposable elements, e.g., a DNA transposon/transposase system, e.g., Sleeping Beauty (SB). SB belongs to the Tc1/mariner superfamily of DNA transposons. DNA transposons translocate from one DNA site to another in a simple, cut-and-paste manner. Transposition is a precise process in which a defined DNA segment is excised from one DNA molecule and moved to another site in the same or different DNA molecule or genome.

[0289] Exemplary DNA transposon/transposase systems include, but are not limited to, Sleeping Beauty (see, e.g., U.S. Pat. Nos. 6,489,458, 8,227,432, the contents of each of which are incorporated by reference in their entirety herein), piggyBac transposon system (see e.g., U.S. Pat. No. 9,228,180, Wilson et al, “PiggyBac Transposon-mediated Gene Transfer in Human Cells,” Molecular Therapy, 15:139-145 (2007), the contents of each of which are incorporated by reference in their entirety herein), piggyBac transposon system (see e.g., Mitra et al., “Functional characterization of piggyBac from the bat Myotis lucifugus unveils an active mammalian DNA transposon,” Proc. Natl. Acad. Sci USA 110:234-239 (2013), the contents of which are incorporated by reference in their entirety herein), TcBuster (see e.g., Woodard et al. “Comparative Analysis of the Recently Discovered hAT Transposon TcBuster in Human Cells,” PLOS ONE, 7(11): e42666 (November 2012), the contents of which are incorporated by reference in their entirety herein), and the Tol2 transposon system (see e.g., Kawakami, “Tol2: a versatile gene transfer vector in vertebrates,” Genome Biol. 2007; 8(Suppl 1): S7, the contents of each of which are incorporated by reference in their entirety herein). Additional exemplary transposon/transposase systems are provided in U.S. Pat. Nos. 7,148,203; 8,227,432; US20110117072; Mates et al., Nat Genet, 41(6):753-61 (2009); and Ivies et al., Cell, 91(4):501-10, (1997), the contents of each of which are incorporated by reference in their entirety herein).

[0290] In some embodiments, the transgenes described herein are introduced into an immune effector cell via the SB transposon/transposase system. The SB transposon system comprises a SB a transposase and SB transposon(s). The SB transposon system can comprise a naturally occurring SB transposase or a derivative, variant, and/or fragment that retains activity, and a naturally occurring SB transposon, or a derivative, variant, and/or fragment that retains activity. An exemplary SB system is described in, Hackett et al., “A Transposon and Transposase System for Human Application,” Mol Ther 18:674-83, (2010), the entire contents of which are incorporated by reference herein.

[0291] In some embodiments, the vector comprises a Left inverted terminal repeat (ITR), i.e., an ITR that is 5′ to an expression cassette, and a Right ITR, i.e., an ITR that is 3′ to an expression cassette. The Left ITR and Right ITR flank the polycistronic expression cassette of the vector. In some embodiments, the Left ITR is in reverse orientation relative to the polycistronic expression cassette, and the Right ITR is in the same orientation relative to the polycistronic expression cassette. In some embodiments, the Right ITR is in reverse orientation relative to the polycistronic expression cassette, and the Left ITR is in the same orientation relative to the polycistronic expression cassette.

[0292] In some embodiments, the Left ITR and the Right ITR are ITRs of a DNA transposon selected from the group consisting of a Sleeping Beauty transposon, a piggyBac transposon, TcBuster transposon, and a Tol2 transposon. In some embodiments, the Left ITR and the Right ITR are ITRs of the Sleeping Beauty DNA transposon.

[0293] In some embodiments, the Left ITR comprises a polynucleotide sequence at least 75%, 80%, 85%, 90%, 95%, 96%, 97%, 98%, 99%, or 100% identical to the polynucleotide sequence of SEQ ID NO: 290 or 291. In some embodiments, the Left ITR comprises a polynucleotide sequence at least 75%, 80%, 85%, 90%, 95%, 96%, 97%, 98%, 99%, or 100% identical to the polynucleotide sequence of SEQ ID NO: 290. In some embodiments, the Left ITR comprises the polynucleotide sequence of SEQ ID NO: 290. In some embodiments, the Left ITR comprises a polynucleotide sequence at least 75%, 80%, 85%, 90%, 95%, 96%, 97%, 98%, 99%, or 100% identical to the polynucleotide sequence of SEQ ID NO: 291. In some embodiments, the Left ITR comprises the polynucleotide sequence of SEQ ID NO: 291. In some embodiments, the Right ITR comprises a polynucleotide sequence at least 75%, 80%, 85%, 90%, 95%, 96%, 97%, 98%, 99%, or 100% identical to the polynucleotide sequence of SEQ ID NO: 292, 293, or 294. In some embodiments, the Right ITR comprises a polynucleotide sequence at least 75%, 80%, 85%, 90%, 95%, 96%, 97%, 98%, 99%, or 100% identical to the polynucleotide sequence of SEQ ID NO: 292. In some embodiments, the Right ITR comprises a polynucleotide sequence at least 75%, 80%, 85%, 90%, 95%, 96%, 97%, 98%, 99%, or 100% identical to the polynucleotide sequence of SEQ ID NO: 293. In some embodiments, the Right ITR comprises a polynucleotide sequence at least 75%, 80%, 85%, 90%, 95%, 96%, 97%, 98%, 99%, or 100% identical to the polynucleotide sequence of SEQ ID NO: 294. In some embodiments, the Right ITR comprises the polynucleotide sequence of SEQ ID NO: 292. In some embodiments, the Right ITR comprises the polynucleotide sequence of SEQ ID NO: 293. In some embodiments, the Right ITR comprises the polynucleotide sequence of SEQ ID NO: 294.

[0294] The polynucleotide sequences of exemplary SB ITRs are provided in Table 12, herein.

TABLE 12
Polynucleotide sequence of exemplary SB ITRs.

| Description | Polynucleotide Sequence | SEQ ID NO |
|---|---|---|
| Left ITR-A | AGTTGAAGTCGGAAGTTTACATACACTTAAGTTGGAGTCATTAAAA | 290 |
| | CTCGTTTTTCAACTACTCCACAAATTTCTTGTTAACAAACAATAGT | |
| | TTTGGCAAGTCAGTTAGGACATCTACTTTGTGCATGACACAAGTCA | |
| | TTTTTCCAACAATTGTTTACAGACAGATTATTTCACTTATAATTCA | |
| | CTGTATCACAATTCCAGTGGGTCAGAAGTTTACATACACTAA | |
| Left ITR-A2 | TACAGTTGAAGTCGGAAGTTTACATACACTTAAGTTGGAGTCATTA | 295 |
| | AAACTCGTTTTTCAACTACTCCACAAATTTCTTGTTAACAAACAAT | |
| | AGTTTTGGCAAGTCAGTTAGGACATCTACTTTGTGCATGACACAAG | |
| | TCATTTTTCCAACAATTGTTTACAGACAGATTATTTCACTTATAAT | |
| | TCACTGTATCACAATTCCAGTGGGTCAGAAGTTTACATACACTAA | |
| Left ITR-B | ATATCAATTGAGTTGAAGTCGGAAGTTTACATACACTTAAGTTGGA | 291 |
| | GTCATTAAAACTCGTTTTTCAACTACACCACAAATTTCTTGTTAAC | |
| | AAACAATAGTTTTGGCAAGTCAGTTAGGACATCTACTTTGTGCATG | |
| | ACACAAGTCATTTTTCCAACAATTGTTTACAGACAGATTATTTCAC | |
| | TTATAATTCACTGTATCACAATTCCAGTGGGTCAGAAGTTTACATA | |
| | CACTAACAATTGATAT | |
| Right ITR-A | TTGAGTGTATGTAAACTTCTGACCCACTGGGAATGTGATGAAAGAA | 292 |
| | ATAAAAGCTGAAATGAATCATTCTCTCTACTATTATTCTGATATTT | |
| | CACATTCTTAAAATAAAGTGGTGATCCTAACTGACCTAAGACAGGG | |
| | AATTTTTACTAGGATTAAATGTCAGGAATTGTGAAAAAGTGAGTTT | |
| | AAATGTATTTGGCTAAGGTGTATGTAAACTTCCGACTTCAACTG | |
| Right ITR-A2 | TTGAGTGTATGTAAACTTCTGACCCACTGGGAATGTGATGAAAGAA | 296 |
| | ATAAAAGCTGAAATGAATCATTCTCTCTACTATTATTCTGATATTT | |
| | CACATTCTTAAAATAAAGTGGTGATCCTAACTGACCTAAGACAGGG | |
| | AATTTTTACTAGGATTAAATGTCAGGAATTGTGAAAAAGTGAGTTT | |
| | AAATGTATTTGGCTAAGGTGTATGTAAACTTCCGACTTCAACTGTA | |
| Right ITR-B | TTGAGTGTATGTTAACTTCTGACCCACTGGGAATGTGATGAAAGAA | 293 |
| | ATAAAAGCTGAAATGAATCATTCTCTCTACTATTATTCTGATATTT | |
| | CACATTCTTAAAATAAAGTGGTGATCCTAACTGACCTTAAGACAGG | |
| | GAATCTTTACTCGGATTAAATGTCAGGAATTGTGAAAAAGTGAGTT | |
| | TAAATGTATTTGGCTAAGGTGTATGTAAACTTCCGACTTCAACT | |
| Right ITR-B2 | TTGAGTGTATGTTAACTTCTGACCCACTGGGAATGTGATGAAAGAA | 297 |
| | ATAAAAGCTGAAATGAATCATTCTCTCTACTATTATTCTGATATTT | |
| | CACATTCTTAAAATAAAGTGGTGATCCTAACTGACCTTAAGACAGG | |
| | GAATCTTTACTCGGATTAAATGTCAGGAATTGTGAAAAAGTGAGTT | |
| | TAAATGTATTTGGCTAAGGTGTATGTAAACTTCCGACTTCAACTGT | |
| | A | |
| Right ITR-C | ATATCTCGAGTTGAGTGTATGTTAACTTCTGACCCACTGGGAATGT | 294 |
| | GATGAAAGAAATAAAAGCTGAAATGAATCATTCTCTCTACTATTAT | |
| | TCTGATATTTCACATTCTTAAAATAAAGTGGTGATCCTAACTGACC | |
| | TTAAGACAGGGAATCTTTACTCGGATTAAATGTCAGGAATTGTGAA | |
| | AAAGTGAGTTTAAATGTATTTGGCTAAGGTGTATGTAAACTTCCGA | |
| | CTTCAACTCTCGAGATAT | |

[0295] In some embodiments, the DNA transposase is a SB transposase. In some embodiments, the SB transposase is selected from the group consisting of SB 11, SB 100X, hSB110, and hSB81. In some embodiments, the SB transposase is SB 11. Exemplary SB transposases are described in U.S. Pat. No. 9,840,696, US20160264949, U.S. Pat. No. 9,228,180, WO2019038197, U.S. Ser. No. 10/174,309, and U.S. Ser. No. 10/570,382, the full contents of each of which is incorporated by reference herein.

[0296] In some embodiments, the DNA transposase comprises an amino acid sequence at least 95%, 96%, 97%, 98%, 99% or 100% identical to the amino acid sequence of SEQ ID NO: 300. In some embodiments, the DNA transposase comprises the amino acid sequence of SEQ ID NO: 300. In some embodiments, the amino acid sequence of the DNA transposase consists of a sequence at least 95%, 96%, 97%, 98%, 99% or 100% identical to the amino acid sequence of SEQ ID NO: 300. In some embodiments, the amino acid sequence of the DNA transposase consists of the amino acid sequence of SEQ ID NO: 300.

[0297] In some embodiments, the DNA transposase comprises an amino acid sequence that lacks its N-terminal methionine. In some embodiments, the DNA transposase comprises an amino acid sequence at least 95%, 96%, 97%, 98%, 99% or 100% identical to the amino acid sequence of SEQ ID NO: 300 lacking its N-terminal methionine, i.e., amino acids 2-340 of SEQ ID NO:300. In some embodiments, the DNA transposase comprises the amino acid sequence of SEQ ID NO: 300 lacking its N-terminal methionine, i.e., amino acids 2-340 of SEQ ID NO:300. In some embodiments, the amino acid sequence of the DNA transposase consists of a sequence at least 95%, 96%, 97%, 98%, 99% or 100% identical to the amino acid sequence of SEQ ID NO: 300 lacking its N-terminal methionine, i.e., amino acids 2-340 of SEQ ID NO:300. In some embodiments, the amino acid sequence of the DNA transposase consists of the amino acid sequence of SEQ ID NO: 300 lacking its N-terminal methionine, i.e., amino acids 2-340 of SEQ ID NO:300.

[0298] In some embodiments, the DNA transposase is encoded by a polynucleotide sequence at least 75%, 80%, 85%, 90%, 95%, 96%, 97%, 98%, 99%, or 100% identical to the polynucleotide sequence of SEQ ID NO: 301. In some embodiments, the DNA transposase is encoded by the polynucleotide sequence of SEQ ID NO: 301.

[0299] In some embodiments, the DNA transposase is encoded by a polynucleotide that is introduced into a cell. In some embodiments, the polynucleotide encoding the DNA transposase is a DNA vector. In some embodiments, the polynucleotide encoding the DNA transposase is an RNA vector. In some embodiments, the DNA transposase is encoded on a first vector and the transgenes are encoded on a second vector. In some embodiments, the DNA transposase is directly introduced to a population of cells as a polypeptide.

[0300] The amino acid and polynucleotide sequence of an exemplary SB transposase is provided in Table 13, herein.

TABLE 13
Amino acid and polynucleotide sequence of an exemplary SB transposase.

| Description | Sequence | SEQ ID NO |
|---|---|---|
| SB11 (exemplary | MGKSKEISQDLRKKIVDLHKSGSSLGAISKRLKVPRSSVQTIVRKYKH | 300 |
| amino acid | HGTTQPSYRSGRRRVLSPRDERTLVRKVQINPRTTAKDLVKMLEETGT | |
| sequence) | KVSISTVKRVLYRHNLKGRSARKKPLLQNRHKKARLRFARAHGDKDRT | |
| | FWRNVLWSDETKIELFGHNDHRYVWRKKGEACKPKNTIPTVKHGGGSI | |
| | MLWGCFAAGGTGALHKIDGIMRKENYVDILKQHLKTSVRKLKLGRKWV | |
| | FQQDNDPKHTSKHVRKWLKDNKVKVLEWPSQSPDLNPIENLWAELKKR | |
| | VRARRPTNLTQLHQLCQEEWAKIHPTYCGKLVEGYPKRLTQVKQFKGN | |
| | ATKY | |
| SB11 (exemplary | ATGGGAAAATCAAAAGAAATCAGCCAAGACCTCAGAAAAAAAATTGTA | 301 |
| nucleotide | GACCTCCACAAGTCTGGTTCATCCTTGGGAGCAATTTCCAAACGCCTG | |
| sequence) | AAAGTACCACGTTCATCTGTACAAACAATAGTACGCAAGTATAAACAC | |
| | CATGGGACCACGCAGCCGTCATACCGCTCAGGAAGGAGACGCGTTCTG | |
| | TCTCCTAGAGATGAACGTACTTTGGTGCGAAAAGTGCAAATCAATCCC | |
| | AGAACAACAGCAAAGGACCTTGTGAAGATGCTGGAGGAAACAGGTACA | |
| | AAAGTATCTATATCCACAGTAAAACGAGTCCTATATCGACATAACCTG | |
| | AAAGGCCGCTCAGCAAGGAAGAAGCCACTGCTCCAAAACCGACATAAG | |
| | AAAGCCAGACTACGGTTTGCAAGAGCACATGGGGACAAAGATCGTACT | |
| | TTTTGGAGAAATGTCCTCTGGTCTGATGAAACAAAAATAGAACTGTTT | |
| | GGCCATAATGACCATCGTTATGTTTGGAGGAAGAAGGGGGAGGCTTGC | |
| | AAGCCGAAGAACACCATCCCAACCGTGAAGCACGGGGGTGGCAGCATC | |
| | ATGTTGTGGGGGTGCTTTGCTGCAGGAGGGACTGGTGCACTTCACAAA | |
| | ATAGATGGCATCATGAGGAAGGAAAATTATGTGGATATATTGAAGCAA | |
| | CATCTCAAGACATCAGTCAGGAAGTTAAAGCTTGGTCGCAAATGGGTC | |
| | TTCCAACAAGACAATGACCCCAAGCATACTTCCAAACACGTGAGAAAA | |
| | TGGCTTAAGGACAACAAAGTCAAGGTATTGGAGTGGCCATCACAAAGC | |
| | CCTGACCTCAATCCTATAGAAAATTTGTGGGCAGAACTGAAAAAGCGT | |
| | GTGCGAGCAAGGAGGCCTACAAACCTGACTCAGTTACACCAGCTCTGT | |
| | CAGGAGGAATGGGCCAAAATTCACCCAACTTATTGTGGGAAGCTTGTG | |
| | GAAGGCTACCCGAAACGTTTGACCCAAGTTAAACAATTTAAAGGCAAT | |
| | GCTACCAAATAC | |

### 1.7 Overview of Expansion Methods

[0301] In certain embodiments of expanding electroporated T cells, a multi-step process is employed. The multi-step process includes at least one expansion protocol, preceded by a separate pre-expansion recovery step.

[0302] In one embodiment, a multi-step manufacture process for electroporated T cells begins with a pre-expansion recovery step occurring immediately after electroporation of the T cells with a nucleic acid, such as a plasmid containing one of the polycistronic vectors described herein. Typically, a pre-expansion recovery step comprises incubation of the electroporated T cells in a first culture medium (also referred to herein as recovery medium) for a period of time sufficient for recovery of the electroporated T cells. In some embodiments, the electroporated T cells are incubated in the first culture medium for 24 hours or less. In some embodiments, the electroporated T cells are incubated in the first culture medium overnight. In some embodiments, the electroporated T cells are incubated in the first culture medium for 18 hours or less, for 12 hours or less, for 11 hours or less, for 10 hours or less, for 9 hours or less, for 8 hours or less, for 7 hours or less, for 6 hours or less, for 5 hours or less, for 4 hours or less, for 3 hours or less, for 2 hours or less, or for 1 hour or less.

[0303] In some cases, the recovery phase can be performed in a gas permeable container using methods known in the art. For example, T cells can be rapidly expanded using non-specific T-cell receptor stimulation in the presence of one or more T cell-stimulating cytokines selected from IL-2, IL-7, IL-15, IL-21, and combinations thereof as well as an exogenous glutathione precursor. In some embodiments, the exogenous glutathione precursor is NAC. In some embodiments, the culture components of the first culture medium comprise IL-15 and an exogenous glutathione precursor. In some embodiments, the culture components of the first culture medium also comprise IL-7. In some embodiments, the culture components of the first culture medium also comprise IL-21 In some embodiments, the culture components of the first culture medium also comprise IL-2. In some embodiments, the exogenous glutathione precursor is NAC. In some embodiments, the culture components of the first culture medium comprise IL-7, IL-15 and NAC. In some embodiments, the culture components of the first culture medium comprise IL-2 and IL-21.

[0304] In multi-step electroporated T cell manufacture, the electroporated T cell population is expanded in number after pre-expansion recovery. This expansion may include multiple expansion phases, referred to as first expansion phase, second expansion phase, third expansion phase, etc. The expansion protocol is generally accomplished using a culture media comprising a number of components, including a cytokine source and in some embodiments, an exogenous glutathione precursor, in a gas-permeable container. In some embodiments, the exogenous glutathione precursor is NAC. In some cases, the expansion phase(s) can be performed using any flasks or containers known by those of skill in the art and can proceed for 7-14 days or longer. In some cases, the expansion phase(s) are performed in a closed system bioreactor, such as G-REX-10 or a G-REX-100.

[0305] In some cases, the expansion phase(s) can be performed using non-specific T-cell receptor stimulus that can include, for example, an anti-CD3 antibody, such as about 30 ng/ml of OKT3, a mouse monoclonal anti-CD3 antibody (commercially available from Ortho-McNeil, Raritan, N.J. or Miltenyi Biotech, Auburn, Calif.) or UCHT-1 (commercially available from BioLegend, San Diego, Calif., USA). In some cases, the expansion phase(s) can be conducted in a supplemented cell culture medium comprising one or more T cell-stimulating cytokines IL-2, IL-7, IL-12, IL-15, IL-21, and combinations thereof, OKT-3, and antigen-presenting feeder cells. In some cases, the antigen-presenting feeder cells (APCs) are PBMCs (peripheral blood mononuclear cells). In some cases, the ratio of T cells to PBMCs and/or antigen-presenting cells in the expansion phase(s) is 1 to 25 and 1 to 500. In some cases, the expansion phase(s) are performed in flasks with the bulk of T cells being mixed with a 100- or 200-fold excess of inactivated feeder cells, about 30 mg/ml OKT3 anti-CD3 antibody and, in some embodiments, about 3000 U/ml IL-2 in 150 ml media. Media replacement is done (generally ½ or ¾ media replacement via respiration with fresh media) until the cells are transferred to an alternative growth chamber. Alternative growth chambers include G-REX flasks and other gas permeable containers.

[0306] In many cases, the feeder cells used in T cell expansion phase(s) are peripheral blood mononuclear cells (PBMCs) obtained from standard whole blood units from healthy blood donors. The PBMCs are obtained using standard methods such as FICOLL-Paque gradient separation. In general, allogeneic PBMCs are inactivated, either via irradiation or heat treatment, and used in the expansion phase(s). In some cases, PBMCs are considered replication incompetent and accepted for use in expansion phase(s) if the total number of viable cells after 14 days of culture is less than the initial viable cell number put into culture on day 0.

[0307] In some cases, PBMCs are considered replication incompetent and accepted for use in the T cell expansion phase(s) described herein if the total number of viable cells, cultured in the presence of OKT3 and IL-2, on day 7 and day 14 has not increased from the initial viable cell number put into culture on day 0 of the relevant expansion phase. In some cases, the PBMCs are cultured in the presence of about 30 ng/ml OKT3 antibody and, in some embodiments, 3000 U/ml IL-2. In some cases, the expansion phases(s) require a ratio of about 2.5×10⁹ feeder cells to between 12.5×10⁶ T cells and 100×10⁶ T cells.

[0308] In some embodiments, the feeder cells express a TCR agonist. In some embodiments, the feeder cells express an agonist of a T cell costimulatory molecule. In some embodiments, the TCR agonist and/or agonist of a T cell costimulatory molecule are expressed on the surface of the feeder cells.

[0309] In one embodiment, the agonist of a T cell costimulatory molecule is a CD28 agonist. In one embodiment, the agonist of a T cell costimulatory molecule is a CD137 (i.e., 4-1BB) agonist. In one embodiment, the agonist of a T cell costimulatory molecule is a CD2 agonist. In some embodiments, a 4-1BB ligand is expressed on the surface of the feeder cells.

[0310] In another aspect, the present disclosure provides methods for expanding a population of T cells comprising culturing the population of T cells in a culture medium comprising a nanomatrix comprising a colloidal suspension of matrices of polymer chains, wherein the matrices are attached to TCR agonists and agonists of a T cell costimulatory molecule, wherein each matrix is 1 to 500 nm in length in its largest dimension.

[0311] In some embodiments, the TCR agonist and/or the CD28 agonist are linked to a nanomatrix comprising a colloidal suspension of matrices of polymer chains, wherein each nanomatrix is 1 to 500 nm in length in its largest dimension. In some embodiments, the nanomatrix is 1 to 50 nm in length in its largest dimension. In some embodiments, the nanomatrix is 50 to 100 nm in length in its largest dimension. In some embodiments, the nanomatrix is 100 to 150 nm in length in its largest dimension. In some embodiments, the nanomatrix is 150 to 200 nm in length in its largest dimension. In some embodiments, the nanomatrix is 200 to 250 nm in length in its largest dimension. In some embodiments, the nanomatrix is 250 to 300 nm in length in its largest dimension. In some embodiments, the nanomatrix is 300 to 350 nm in length in its largest dimension. In some embodiments, the nanomatrix is 350 to 400 nm in length in its largest dimension. In some embodiments, the nanomatrix is 400 to 450 nm in length in its largest dimension. In some embodiments, the nanomatrix is 450 to 500 nm in length in its largest dimension.

[0312] In some embodiments, the TCR agonists and agonists of a T cell costimulatory molecule utilized in the described methods are attached to the same polymer chains. In some embodiments, the TCR agonists and agonists of a T cell costimulatory molecule are attached to different polymer chains. In some embodiments, the TCR agonists are attached to the matrices at 25 μg per mg of matrix. In some embodiments, the agonist of a T cell costimulatory molecule is attached to the matrices at 25 μg per mg of matrix. Typically, the agonists are covalently attached to the polymer chains that comprise the matrices within the nanomatrix.

[0313] In some embodiments, the TCR agonist and the CD28 agonist are attached to the same polymer chains. In some embodiments, the TCR agonist and the CD28 agonist are attached to different polymer chains. In some embodiments, the TCR agonist, or fragment thereof, is attached to the nanomatrix at 25 μg per mg of nanomatrix. In some embodiments, the TCR agonist, or fragment thereof, is attached to the nanomatrix at about 5 μg to about 10 μg per mg of nanomatrix. In some embodiments, the TCR agonist, or fragment thereof, is attached to the nanomatrix at about 10 μg to about 15 μg per mg of nanomatrix. In some embodiments, the TCR agonist, or fragment thereof, is attached to the nanomatrix at about 15 μg to about 20 μg per mg of nanomatrix. In some embodiments, the TCR agonist, or fragment thereof, is attached to the nanomatrix at about 20 μg to about 25 μg per mg of nanomatrix. In some embodiments, the TCR agonist, or fragment thereof, is attached to the nanomatrix at about 25 μg to about 30 μg per mg of nanomatrix. In some embodiments, the TCR agonist, or fragment thereof, is attached to the nanomatrix at about 30 μg to about 35 μg per mg of nanomatrix. In some embodiments, the TCR agonist, or fragment thereof, is attached to the nanomatrix at about 35 μg to about 40 μg per mg of nanomatrix. In some embodiments, the TCR agonist, or fragment thereof, is attached to the nanomatrix at about 40 μg to about 45 μg per mg of nanomatrix. In some embodiments, the TCR agonist, or fragment thereof, is attached to the nanomatrix at about 45 mg to about 50 mg per mg of nanomatrix. In some embodiments, the TCR agonist is a CD3 agonist.

[0314] In some embodiments, the CD28 agonist, or fragment thereof, is attached to the nanomatrix at 25 mg per mg of nanomatrix. In some embodiments, the CD28 agonist, or fragment thereof, is attached to the nanomatrix at about 5 μg to about 10 μg per mg of nanomatrix. In some embodiments, the CD28 agonist, or fragment thereof, is attached to the nanomatrix at about 10 μg to about 15 μg per mg of nanomatrix. In some embodiments, the CD28 agonist, or fragment thereof, is attached to the nanomatrix at about 15 μg to about 20 μg per mg of nanomatrix. In some embodiments, the CD28 agonist, or fragment thereof, is attached to the nanomatrix at about 20 μg to about 25 μg per mg of nanomatrix. In some embodiments, the CD28 agonist, or fragment thereof, is attached to the nanomatrix at about 25 μg to about 30 μg per mg of nanomatrix. In some embodiments, the CD28 agonist, or fragment thereof, is attached to the nanomatrix at about 30 μg to about 35 μg per mg of nanomatrix. In some embodiments, the CD28 agonist, or fragment thereof, is attached to the nanomatrix at about 35 μg to about 40 μg per mg of nanomatrix. In some embodiments, the CD28 agonist, or fragment thereof, is attached to the nanomatrix at about 40 μg to about 45 μg per mg of nanomatrix. In some embodiments, the CD28 agonist, or fragment thereof, is attached to the nanomatrix at about 45 μg to about 50 μg per mg of nanomatrix.

[0315] In some embodiments, the ratio of volume of nanomatrix to volume of T cells is greater than or equal to 1:5. In some embodiments, the ratio of volume of nanomatrix to volume of T cells is greater than or equal to 1:10. In some embodiments, the ratio of volume of nanomatrix to volume of T cells is greater than or equal to 1:25. In some embodiments, the ratio of volume of nanomatrix to volume of T cells is greater than or equal to 1:50. In some embodiments, the ratio of volume of nano matrix to volume of T cells is greater than or equal to 1:100. In some embodiments, the ratio of volume of nanomatrix to volume of T cells is greater than or equal to 1:200. In some embodiments, the ratio of volume of nanomatrix to volume of T cells is greater than or equal to 1:300. In some embodiments, the ratio of volume of nanomatrix to volume of T cells is greater than or equal to 1:400. In some embodiments, the ratio of volume of nanomatrix to volume of T cells is greater than or equal to 1:500. In some embodiments, the ratio of volume of nanomatrix to volume of T cells is greater than or equal to 1:600. In some embodiments, the ratio of volume of nanomatrix to volume of T cells is greater than or equal to 1:700. In some embodiments, the ratio of volume of nanomatrix to volume of T cells is greater than or equal to 1:800. In some embodiments, the ratio of volume of nanomatrix to volume of T cells is greater than or equal to 1:900. In some embodiments, the ratio of volume of nanomatrix to volume of T cells is greater than or equal to 1:1,000.

[0316] In some embodiments, the ratio of number of matrices to T cells is greater than or equal to 1:500. In some embodiments, the ratio of number of matrices to T cells is 1:500 to 1:750. In some embodiments, the ratio of number of matrices to T cells is 1:750 to 1:1,000. In some embodiments, the ratio of number of matrices to T cells is 1:1,000 to 1:1,250. In some embodiments, the ratio of number of matrices to T cells is 1:1,250 to 1:1,500. In some embodiments, the ratio of number of matrices to T cells is 1:1,500 to 1:1,750. In some embodiments, the ratio of number of matrices to T cells is 1:1,750 to 1:2,000. In some embodiments, the ratio of number of matrices to T cells is 1:2,000 to 1:2,250. In some embodiments, the ratio of number of matrices to T cells is 1:2,250 to 1:2,500. In some embodiments, the ratio of number of matrices to T cells is 1:2,500 to 1:2,750. In some embodiments, the ratio of number of matrices to T cells is 1:2,750 to 1:3,000. In some embodiments, the ratio of number of matrices to T cells is 1:3,000 to 1:3,500. In some embodiments, the ratio of number of matrices to T cells is 1:3,500 to 1:4,000. In some embodiments, the ratio of number of matrices to T cells is 1:4,000 to 1:5,000.

[0317] In some embodiments, the agonists are recombinant agonists. In some embodiments, the agonists are antibodies. In some embodiments, the antibodies are humanized antibodies. In some embodiments, the CD3 agonist is an OKT3 antibody or an UCHT1 antibody.

[0318] In another aspect of the method disclosed herein, the method for expanding a population of T cells comprises contacting the population of T cells with a nanomatrix comprising a colloidal suspension of matrices of polymer chains, wherein the matrices are attached to CD3 agonists and CD28 agonists, wherein the nanomatrix provides activation signals to the population of T cells, thereby activating and inducing the population of T cells to proliferate, wherein each matrix is 1 to 500 nm in length in its largest dimension, and wherein the method does not comprise the use of feeder cells during expansion of the population of T cells.

[0319] In some embodiments, the population of T cells contacted with the nanomatrix further comprises tumor cells. In some embodiments, the population of T cells is isolated from a subject and contacted with the nanomatrix without an additional expansion process of the population of T cells prior to contacting the population of T cells with the nanomatrix.

[0320] In some embodiments, the CD3 agonists and the CD28 agonists are attached to the same polymer chains. In some embodiments, the CD3 agonists and the CD28 agonists are attached to different polymer chains. In some embodiments, the CD3 agonists, or fragments thereof, are attached to the nanomatrix at 25 μg per mg of nanomatrix. In some embodiments, the CD3 agonists, or fragments thereof, are attached to the nanomatrix at about 5 μg to about 10 μg per mg of nanomatrix. In some embodiments, the CD3 agonists, or fragments thereof, are attached to the nanomatrix at about 10 μg to about 15 μg per mg of nanomatrix. In some embodiments, the CD3 agonists, or fragments thereof, are attached to the nanomatrix at about 15 μg to about 20 μg per mg of nanomatrix. In some embodiments, the CD3 agonists, or fragments thereof, are attached to the nanomatrix at about 20 μg to about 25 μg per mg of nanomatrix. In some embodiments, the CD3 agonists, or fragments thereof, are attached to the nanomatrix at about 25 μg to about 30 μg per mg of nanomatrix. In some embodiments, the CD3 agonists, or fragments thereof, are attached to the nanomatrix at about 30 μg to about 35 μg per mg of nanomatrix. In some embodiments, the CD3 agonists, or fragments thereof, are attached to the nanomatrix at about 35 μg to about g per mg of nanomatrix. In some embodiments, the CD3 agonists, or fragments thereof, are attached to the nanomatrix at about 40 μg to about 45 μg per mg of nanomatrix. In some embodiments, the CD3 agonists, or fragments thereof, are attached to the nanomatrix at about 45 μg to about 50 μg per mg of nanomatrix.

[0321] In some embodiments, the CD28 agonists, or fragments thereof, are attached to the nanomatrix at 25 μg per mg of nanomatrix. In some embodiments, the CD28 agonists, or fragments thereof, are attached to the nanomatrix at about 5 μg to about 10 μg per mg of nanomatrix. In some embodiments, the CD28 agonists, or fragments thereof, are attached to the nanomatrix at about 10 μg to about 15 μg per mg of nanomatrix. In some embodiments, the CD28 agonists, or fragments thereof, are attached to the nanomatrix at about 15 μg to about 20 μg per mg of nanomatrix. In some embodiments, the CD28 agonists, or fragments thereof, are attached to the nanomatrix at about 20 μg to about 25 μg per mg of nanomatrix. In some embodiments, the CD28 agonists, or fragments thereof, are attached to the nanomatrix at about 25 μg to about g per mg of nanomatrix. In some embodiments, the CD28 agonists, or fragments thereof, are attached to the nanomatrix at about 30 μg to about 35 μg per mg of nanomatrix. In some embodiments, the CD28 agonists, or fragments thereof, are attached to the nanomatrix at about 35 μg to about 40 μg per mg of nanomatrix. In some embodiments, the CD28 agonists, or fragments thereof, are attached to the nanomatrix at about 40 μg to about 45 μg per mg of nanomatrix. In some embodiments, the CD28 agonists, or fragments thereof, are attached to the nanomatrix at about 45 μg to about 50 μg per mg of nanomatrix. In some embodiments, the nanomatrix is TRANSACT™ a colloidal polymeric nanomatrix covalently attached to humanized recombinant agonists against human CD3 and CD28 from Miltenyi Biotec (MACS GMP T Cell Transact, Cat #130-019-011).

[0322] In some cases, the expansion phase(s) can be conducted in a supplemented cell culture medium comprising one or more T cell-stimulating cytokines IL-2, IL-7, IL-12, IL-15, IL-21, and combinations thereof and in some embodiments, an exogenous glutathione precursor. In some embodiments, the exogenous glutathione precursor is NAC. Media replacement is done (generally 30% to 99% media replacement via respiration with fresh media) until the cells are transferred to an alternative growth chamber. Alternative growth chambers include G-REX flasks and other gas permeable containers.

[0323] In some embodiments, a first expansion step is performed in a second culture medium. In some embodiments, the second culture medium comprises IL-7, IL-12 and/or IL-21. In some embodiments, the second culture medium comprises IL-7. In some embodiments, the second culture medium comprises IL-12. In some embodiments, the second culture medium comprises IL-21. In some embodiments, the second culture medium comprises IL-7 and IL-21. In some embodiments, the second culture medium comprises IL-7, IL-12 and II_-21, In some embodiments, one or more of the cytokines is provided in the second culture medium only at day 1, whereas other cytokines are replenished throughout the culture period. In some embodiments, one or more of IL-7, IL-12 and/or IL-21 are provided only on day 1 of culture. In some embodiments, IL-7 is provided only on day 1 of culture. In some embodiments, IL-12 is provided only on day 1 of culture. In some embodiments, IL-7 and IL-12 is provided only on day 1 of culture. In some embodiments, IL-21 is provided at regular intervals throughout the culture period. In some embodiments, IL-7 and IL-12 is provided only on day 1 of culture and IL-21 is provided at regular intervals throughout the culture period.

[0324] In some embodiments, a second expansion step is performed in a third culture medium after the first expansion step. In some embodiments, the T cells are cultured and/or expanded in the third culture medium after being cultured and/or expanded in the first and second culture media. In some embodiments, the third culture medium comprises one or more of IL-2, IL-12 and IL-21. In some embodiments, the third culture medium comprises IL-2. In some embodiments, the third culture medium comprises IL-12. In some embodiments, the third culture medium comprises IL-21. In some embodiments, the third culture medium comprises NAC. In some embodiments, the third culture medium comprises IL-12, IL-21 and NAC. In some embodiments, the third culture medium comprises IL-2, IL-12, IL-21 and NAC. In some embodiments, one or more of IL-2, IL-12 and/or IL-21 are provided only on day 1 of culture. In some embodiments, IL-12 is provided only on day 1 of culture. In some embodiments, IL-2 and IL-21 are provided at regular intervals throughout the culture period. In some embodiments, IL-12 is provided only on day 1 of culture and IL-2 and IL-21 are provided at regular intervals throughout the culture period.

[0325] In some cases, the expansion phase(s) may optionally be followed by a step wherein T cells are selected for transgene expression. Any selection method known in the art may be used, such as flow cytometry. Optionally, a cell viability assay can be performed after the expansion phase(s) using standard assays known in the art. For example, a trypan blue exclusion assay can be done on a sample of the bulk T cells, which selectively labels dead cells and allows a viability assessment. In some cases, T cell samples can be counted and viability determined using a Cellometer K2 automated cell counter (Nexcelom Bioscience, Lawrence, Mass.). In some embodiments, the T cells described herein are transposed with a mouse/human chimeric TCR. In some embodiments, at least one of the constant domains of the mouse/human chimeric TCR is a mouse sequence. In some embodiments, one or more of the variable domains of the mouse/human chimeric TCR is a human sequence. In some embodiments, binding agents that specifically bind mouse constant domains are used to select and/or enrich T cells expressing mouse/human chimeric TCRs. In some embodiments, the binding agents are antibodies. In some embodiments, the antibodies are monoclonal antibodies.

[0326] In some embodiments, the one or more T cell-stimulating cytokines utilized in the culture methods described herein is selected from the group consisting of IL-2, IL-7, IL-12, IL-15, IL-21, and combinations thereof. In some embodiments, the final concentration of the T cell-stimulating cytokine utilized in the first culture medium is about 10 U/ml to about 7,000 U/ml. In some embodiments, the final concentration of the T cell-stimulating cytokine utilized in the second culture medium is about 10 U/ml to about 7,000 U/ml. In some embodiments, the final concentration of the T cell-stimulating cytokine utilized in the third culture medium is about 10 U/ml to about 7,000 U/ml. In some embodiments, the final concentration of the T cell-stimulating cytokine utilized in the fourth medium is about 10 U/ml to about 7,000 U/ml.

[0327] In certain embodiments, the first culture medium utilized in the methods herein does not comprise IL-2, IL-12, or IL-21; both IL-2 and IL-21; both IL-2 and IL-12; both IL-12 and IL-21; or all of IL-2, IL-12 and IL-21. In certain embodiments, the second culture medium does not comprise IL-2, IL-15 or IL-21; both IL-2 and IL-21; both IL-2 and IL-15; both IL-15 and IL-21; or all of IL-2, IL-15 and IL-21. In certain embodiments, the third culture medium does not comprise IL-2, IL-7 or IL-15; both IL-2 and IL-15; both IL-2 and IL-7; both IL-7 or IL15; or all of IL-2, IL-7 and IL-15.

[0328] In some embodiments, the culture medium utilized in the expansion phase(s) is selected from the group consisting of the second culture medium and the third culture medium. In some embodiments, the medium utilized in the first expansion phase is the second culture medium. In some embodiments, a second expansion phase is performed and the culture medium utilized in the second expansion phase is the third culture medium.

[0329] In some embodiments, the culture medium utilized in the pre-expansion recovery step or one or more of the expansion phases is supplemented with one or more T cell-stimulating cytokine at a time interval selected from the group consisting of 1 day, 2 days, 3 days, 4 days, 5 days, and 6 days. In some embodiments, the medium is supplemented with the T cell-stimulating cytokine at a time interval ranging from 1-2 days, 2-3 days, 3-4 days, 4-5 days, or 5-6 days. In some embodiments, the time interval is 1 day. In some embodiments, the time interval is 2 days. In some embodiments, the time interval is 3 days. In some embodiments, the time interval is 4 days. In some embodiments, the time interval is 5 days. In some embodiments, the time interval is 6 days.

[0330] In some embodiments, the medium utilized in the pre-expansion recovery step one or more of the expansion phases is changed at a time interval selected from the group consisting of 1 day, 2 days, 3 days, 4 days, 5 days, and 6 days. In one embodiment, 30% to 99% of the medium utilized in one or more of the expansion phases is changed at a time interval selected from the group consisting of 1 day, 2 days, 3 days, 4 days, 5 days, and 6 days.

[0331] In some embodiments, the final concentration of the T cell-stimulating cytokine in any of the culture media described herein is 10 U/ml to 7,000 U/ml. In some embodiments, the final concentration of the T cell-stimulating cytokine is 100 U/ml to 200 U/ml. In some embodiments, the final concentration of the T cell-stimulating cytokine is 200 U/ml to 300 U/ml. In some embodiments, the final concentration of the T cell-stimulating cytokine is 300 U/ml to 400 U/ml. In some embodiments, the final concentration of the T cell-stimulating cytokine is 400 U/ml to 500 U/ml. In some embodiments, the final concentration of the T cell-stimulating cytokine is 500 U/ml to 600 U/ml. In some embodiments, the final concentration of the T cell-stimulating cytokine is 600 U/ml to 700 U/ml. In some embodiments, the final concentration of the T cell-stimulating cytokine is 700 U/ml to 800 U/ml. In some embodiments, the final concentration of the T cell-stimulating cytokine is 800 U/ml to 900 U/ml. In some embodiments, the final concentration of the T cell-stimulating cytokine is 900 U/ml to 1000 U/ml. In some embodiments, the final concentration of the T cell-stimulating cytokine is 1,000 U/ml to 1,500 U/ml. In some embodiments, the final concentration of the T cell-stimulating cytokine is 1,500 U/ml to 2,000 U/ml. In some embodiments, the final concentration of the T cell-stimulating cytokine is 2,000 U/ml to 2,500 U/ml. In some embodiments, the final concentration of the T cell-stimulating cytokine is 2,500 U/ml to 3,000 U/ml. In some embodiments, the final concentration of the T cell-stimulating cytokine is 3,000 U/ml to 3,500 U/ml. In some embodiments, the final concentration of the T cell-stimulating cytokine is 3,500 U/ml to 4,000 U/ml. In some embodiments, the final concentration of the T cell-stimulating cytokine is 4,000 U/ml to 4,500 U/ml. In some embodiments, the final concentration of the T cell-stimulating cytokine is 4,500 U/ml to 5,000 U/ml. In some embodiments, the final concentration of the T cell-stimulating cytokine is 5,000 U/ml to 5,500 U/ml. In some embodiments, the final concentration of the T cell-stimulating cytokine is 5,500 U/ml to 6,000 U/ml. In some embodiments, the final concentration of the T cell-stimulating cytokine is 6,000 U/ml to 6,500 U/ml. In some embodiments, the final concentration of the T cell-stimulating cytokine is 6,500 U/ml to 7,000 U/ml.

[0332] In some embodiments, the final concentration of the T cell-stimulating cytokine is 1-10,000 ng/ml. In some embodiments, the final concentration of T cell-stimulating cytokine utilized is less than 10,000 ng/ml, optionally less than 1000, 750, 500, 400, 300, 200, 100, 50, or 30 ng/ml. In some embodiments, the final concentration of T cell-stimulating cytokine utilized is from about 5 ng/ml to about 30 ng/ml. In further embodiments, the final concentration of T cell-stimulating cytokine utilized is greater than 5 ng/ml.

[0333] In some embodiments, the final concentration of the one or more T cell-stimulating cytokines in the first culture medium is greater than 1 ng/ml. In further embodiments, the final concentration of the one or more T cell-stimulating cytokines in the first culture medium is greater than 1 ng/ml to about 100 ng/ml. In a specific embodiment, the final concentration of the one or more T cell-stimulating cytokines in the first culture medium is from about 5 ng/ml to about 30 ng/ml.

[0334] In some embodiments, the final concentration of the one or more T cell-stimulating cytokines in the second culture medium is greater than 1 ng/ml. In further embodiments, the final concentration of the one or more T cell-stimulating cytokines in the second culture medium is greater than 1 ng/ml to about 100 ng/ml. In a specific embodiment, the final concentration of the one or more T cell-stimulating cytokines in the second culture medium is from about 5 ng/ml to about 30 ng/ml.

[0335] In some embodiments, the final concentration of the one or more T cell-stimulating cytokines in the third culture medium is greater than 1 ng/ml. In further embodiments, the final concentration of the one or more T cell-stimulating cytokines in the third culture medium is greater than 1 ng/ml to about 100 ng/ml. In a specific embodiment, the final concentration of the one or more T cell-stimulating cytokines in the third culture medium is from about 5 ng/ml to about 30 ng/ml.

[0336] The one or more T-cell stimulating cytokines can be any cytokine effective in stimulating T-cells. In some embodiments, the T cell-stimulating cytokine is IL-2, IL-7, IL-12, IL-15 and/or IL-21.

[0337] In some embodiments, the T cells are expanded for up to a total of 3, 4, 5, 6, 7, 8, 9, 10, 11, 12, 13, 14, 15, 16, 17, 18, 19, 20, 21, 22, 23, 24, 25, 26, 27 or 28 days from electroporation. In some embodiments, the T cells are expanded for a total of 9-25 days, 9-21 days, or 9-14 days. In some embodiments, the T cells are expanded for up to a total of 9 days. In some embodiments, the T cells are expanded for up to a total of 10 days. In some embodiments, the T cells are expanded for up to a total of 11 days. In some embodiments, the T cells are expanded for up to a total of 12 days. In some embodiments, the T cells are expanded for up to a total of 13 days. In some embodiments, the T cells are expanded for up to a total of 14 days. In some embodiments, the T cells are expanded for up to a total of 15 days. In some embodiments, the T cells are expanded for up to a total of 16 days. In some embodiments, the T cells are expanded for up to a total of 17 days. In some embodiments, the T cells are expanded for up to a total of 18 days. In some embodiments, the T cells are expanded for up to a total of 19 days. In some embodiments, the T cells are expanded for up to a total of 20 days. In some embodiments, the T cells are expanded for up to a total of 21 days. In some embodiments, the T cells are expanded for up to a total of 22 days. In some embodiments, the T cells are expanded for up to a total of 23 days. In some embodiments, the T cells are expanded for up to a total of 24 days. In some embodiments, the T cells are expanded for up to a total of 25 days. In some embodiments, the T cells are expanded for up to a total of 26 days. In some embodiments, the T cells are expanded for up to a total of 27 days. In some embodiments, the T cells are expanded for up to a total of 28 days.

[0338] In some embodiments, the population of T cells is expanded 50 to 1,000,000-fold. In some embodiments, the population of T cells is expanded 50 to 500-fold. In some embodiments, the population of T cells is expanded 500 to 1,000-fold. In some embodiments, the population of T cells is expanded 500 to 4,000-fold. In some embodiments, the population of T cells is expanded 1,000 to 2,500-fold. In some embodiments, the population of T cells is expanded 2,500 to 5,000-fold. In some embodiments, the population of T cells is expanded 5,000 to 10,000-fold. In some embodiments, the population of T cells is expanded 10,000 to 20,000-fold. In some embodiments, the population of T cells is expanded 20,000 to 30,000-fold. In some embodiments, the population of T cells is expanded 30,000 to 40,000-fold. In some embodiments, the population of T cells is expanded 40,000 to 50,000-fold. In some embodiments, the population of T cells is expanded 50,000 to 100,000-fold. In some embodiments, the population of T cells is expanded 100,000 to 150,000-fold. In some embodiments, the population of T cells is expanded 150,000 to 200,000-fold. In some embodiments, the population of T cells is expanded 200,000 to 250,000-fold. In some embodiments, the population of T cells is expanded 250,000 to 300,000-fold. In some embodiments, the population of T cells is expanded 300,000 to 350,000-fold. In some embodiments, the population of T cells is expanded 350,000 to 400,000-fold. In some embodiments, the population of T cells is expanded 400,000 to 450,000-fold. In some embodiments, the population of T cells is expanded 450,000 to 500,000-fold. In some embodiments, the population of T cells is expanded 500,000 to 550,000-fold. In some embodiments, the population of T cells is expanded 550,000 to 600,000-fold. In some embodiments, the population of T cells is expanded 600,000 to 650,000-fold. In some embodiments, the population of T cells is expanded 650,000 to 700,000-fold. In some embodiments, the population of T cells is expanded 700,000 to 750,000-fold. In some embodiments, the population of T cells is expanded 750,000 to 800,000-fold. In some embodiments, the population of T cells is expanded 800,000 to 850,000-fold. In some embodiments, the population of T cells is expanded 850,000 to 900,000-fold. In some embodiments, the population of T cells is expanded 900,000 to 950,000-fold. In some embodiments, the population of T cells is expanded 950,000 to 1,000,000-fold.

[0339] In some embodiments, the population of T cells is expanded from an initial population of T cells of between 10,000 and 1×10⁹ T cells. In some embodiments, the population of T cells is expanded from an initial population of T cells of between 10,000 and 100,000 T cells. In some embodiments, the population of T cells is expanded from an initial population of T cells of between 100,000 and 250,000 T cells. In some embodiments, the population of T cells is expanded from an initial population of T cells of between 250,000 and 500,000 T cells. In some embodiments, the population of T cells is expanded from an initial population of T cells of between 500,000 and 750,000 T cells. In some embodiments, the population of T cells is expanded from an initial population of T cells of between 750,000 and 1,000,000 T cells. In some embodiments, the population of T cells is expanded from an initial population of T cells of between 1×10⁶ and 2×10⁶ T cells. In some embodiments, the population of T cells is expanded from an initial population of T cells of between 2×10⁶ and 3×10⁶ T cells. In some embodiments, the population of T cells is expanded from an initial population of T cells of between 3×10⁶ and 4×10⁶ T cells. In some embodiments, the population of T cells is expanded from an initial population of T cells of between 4×10⁶ and 5×10⁶ T cells. In some embodiments, the population of T cells is expanded from an initial population of T cells of between 5×10⁶ and 6×10⁶ T cells. In some embodiments, the population of T cells is expanded from an initial population of T cells of between 6×10⁶ and 7×10⁶ T cells. In some embodiments, the population of T cells is expanded from an initial population of T cells of between 7×10⁶ and 8×10⁶ T cells. In some embodiments, the population of T cells is expanded from an initial population of T cells of between 8×10⁶ and 9×10⁶ T cells. In some embodiments, the population of T cells is expanded from an initial population of T cells of between 9×10⁶ and 1×10⁷ T cells. In some embodiments, the population of T cells is expanded from an initial population of T cells of between 1×10⁷ and 5×10⁷ T cells. In some embodiments, the population of T cells is expanded from an initial population of T cells of between 5×10⁷ and 1×10⁸ T cells. In some embodiments, the population of T cells is expanded from an initial population of T cells of between 1×10⁸ and 5×10⁸ T cells. In some embodiments, the population of T cells is expanded from an initial population of T cells of between 5×10⁸ and 1×10⁹ T cells.

[0340] In some embodiments, the population of T cells is expanded at least 50-fold at day 14 of the expansion. In some embodiments, the population of T cells is expanded at least 100-fold at day 14 of the expansion. In some embodiments, the population of T cells is expanded at least 500-fold at day 14 of the expansion. In some embodiments, the population of T cells is expanded at least 1000-fold at day 14 of the expansion. In some embodiments, the population of T cells is expanded at least 1,500-fold at day 14 of the expansion. In some embodiments, the population of T cells is expanded at least 5,000-fold at day 14 of the expansion. In some embodiments, the population of T cells is expanded at least 7,500-fold at day 14 of the expansion. In some embodiments, the population of T cells is expanded at least 10,000-fold at day 14 of the expansion. In some embodiments, the population of T cells is expanded at least 15,000-fold at day 14 of the expansion. In some embodiments, the population of T cells is expanded at least 20,000-fold at day 14 of the expansion. In some embodiments, the population of T cells is expanded at least 25,000-fold at day 14 of the expansion. In some embodiments, the population of T cells is expanded at least 30,000-fold at day 14 of the expansion. In some embodiments, the population of T cells is expanded at least 40,000-fold at day 14 of the expansion. In some embodiments, the population of T cells is expanded at least 50,000-fold at day 14 of the expansion. In some embodiments, the population of T cells is expanded at least 60,000-fold at day 14 of the expansion. In some embodiments, the population of T cells is expanded at least 70,000-fold at day 14 of the expansion. In some embodiments, the population of T cells is expanded at least 80,000-fold at day 14 of the expansion. In some embodiments, the population of T cells is expanded at least 90,000-fold at day 14 of the expansion. In some embodiments, the population of T cells is expanded at least 100,000-fold at day 14 of the expansion. In some embodiments, the population of T cells is expanded at least 110,000-fold at day 14 of the expansion. In some embodiments, the population of T cells is expanded at least 120,000-fold at day 14 of the expansion. In some embodiments, the population of T cells is expanded at least 130,000-fold at day 14 of the expansion. In some embodiments, the population of T cells is expanded at least 140,000-fold at day 14 of the expansion. In some embodiments, the population of T cells is expanded at from 1,000-fold to 5,000-fold at day 14 of the expansion.

[0341] In some embodiments, the population of T cells is expanded at least 10-fold at day 10 of the expansion. In some embodiments, the population of T cells is expanded at least 50-fold at day 10 of the expansion. In some embodiments, the population of T cells is expanded at least 100-fold at day 10 of the expansion. In some embodiments, the population of T cells is expanded at least 150-fold at day 10 of the expansion. In some embodiments, the population of T cells is expanded at least 500-fold at day 10 of the expansion. In some embodiments, the population of T cells is expanded at least 750-fold at day 10 of the expansion. In some embodiments, the population of T cells is expanded at least 1000-fold at day 10 of the expansion. In some embodiments, the population of T cells is expanded at least 1500-fold at day 10 of the expansion. In some embodiments, the population of T cells is expanded at least 2000-fold at day 10 of the expansion. In some embodiments, the population of T cells is expanded at least 2500-fold at day 10 of the expansion. In some embodiments, the population of T cells is expanded at least 3000-fold at day 10 of the expansion. In some embodiments, the population of T cells is expanded at least 4000-fold at day 10 of the expansion. In some embodiments, the population of T cells is expanded at least 5000-fold at day 10 of the expansion. In some embodiments, the population of T cells is expanded at least 6000-fold at day 10 of the expansion. In some embodiments, the population of T cells is expanded at least 7000-fold at day 10 of the expansion. In some embodiments, the population of T cells is expanded at least 8000-fold at day 10 of the expansion. In some embodiments, the population of T cells is expanded at least 9000-fold at day 10 of the expansion. In some embodiments, the population of T cells is expanded at least 10,000-fold at day 10 of the expansion.

[0342] In some embodiments, the population of T cells is expanded at most 150,000-fold at day 14 of the expansion. In some embodiments, the population of T cells is expanded at most 5,000-fold at day 14 of the expansion. In some embodiments, the population of T cells is expanded at most 7,500-fold at day 14 of the expansion. In some embodiments, the population of T cells is expanded at most 10,000-fold at day 14 of the expansion. In some embodiments, the population of T cells is expanded at most 15,000-fold at day 14 of the expansion. In some embodiments, the population of T cells is expanded at most 20,000-fold at day 14 of the expansion. In some embodiments, the population of T cells is expanded at most 25,000-fold at day 14 of the expansion. In some embodiments, the population of T cells is expanded at most 30,000-fold at day 14 of the expansion. In some embodiments, the population of T cells is expanded at most 40,000-fold at day 14 of the expansion. In some embodiments, the population of T cells is expanded at most 50,000-fold at day 14 of the expansion. In some embodiments, the population of T cells is expanded at most 60,000-fold at day 14 of the expansion. In some embodiments, the population of T cells is expanded at most 70,000-fold at day 14 of the expansion. In some embodiments, the population of T cells is expanded at most 80,000-fold at day 14 of the expansion. In some embodiments, the population of T cells is expanded at most 90,000-fold at day 14 of the expansion. In some embodiments, the population of T cells is expanded at most 100,000-fold at day 14 of the expansion. In some embodiments, the population of T cells is expanded at most 110,000-fold at day 14 of the expansion. In some embodiments, the population of T cells is expanded at most 120,000-fold at day 14 of the expansion. In some embodiments, the population of T cells is expanded at most 130,000-fold at day 14 of the expansion. In some embodiments, the population of T cells is expanded at most 140,000-fold at day 14 of the expansion.

[0343] In some embodiments, the population of T cells is expanded at least 100-fold at day 21 of the expansion. In some embodiments, the population of T cells is expanded at least 500-fold at day 21 of the expansion. In some embodiments, the population of T cells is expanded at least 1,000-fold at day 21 of the expansion. In some embodiments, the population of T cells is expanded at least 5,000-fold at day 21 of the expansion. In some embodiments, the population of T cells is expanded at least 10,000-fold at day 21 of the expansion. In some embodiments, the population of T cells is expanded at least 15,000-fold at day 21 of the expansion. In some embodiments, the population of T cells is expanded at least 20,000-fold at day 21 of the expansion. In some embodiments, the population of T cells is expanded at least 25,000-fold at day 21 of the expansion. In some embodiments, the population of T cells is expanded at least 30,000-fold at day 21 of the expansion. In some embodiments, the population of T cells is expanded at least 40,000-fold at day 21 of the expansion. In some embodiments, the population of T cells is expanded at least 50,000-fold at day 21 of the expansion. In some embodiments, the population of T cells is expanded at least 60,000-fold at day 21 of the expansion. In some embodiments, the population of T cells is expanded at least 70,000-fold at day 21 of the expansion. In some embodiments, the population of T cells is expanded at least 80,000-fold at day 21 of the expansion. In some embodiments, the population of T cells is expanded at least 90,000-fold at day 21 of the expansion. In some embodiments, the population of T cells is expanded at least 100,000-fold at day 21 of the expansion. In some embodiments, the population of T cells is expanded at least 110,000-fold at day 21 of the expansion. In some embodiments, the population of T cells is expanded at least 120,000-fold at day 21 of the expansion. In some embodiments, the population of T cells is expanded at least 130,000-fold at day 21 of the expansion. In some embodiments, the population of T cells is expanded at least 140,000-fold at day 21 of the expansion. In some embodiments, the population of T cells is expanded at least 150,000-fold at day 21 of the expansion. In some embodiments, the population of T cells is expanded at least 200,000-fold at day 21 of the expansion. In some embodiments, the population of T cells is expanded at least 300,000-fold at day 21 of the expansion. In some embodiments, the population of T cells is expanded at least 400,000-fold at day 21 of the expansion.

[0344] In some embodiments, the population of T cells is expanded at most 500,000-fold at day 21 of the expansion. In some embodiments, the population of T cells is expanded at most 20,000-fold at day 21 of the expansion. In some embodiments, the population of T cells is expanded at most 25,000-fold at day 21 of the expansion. In some embodiments, the population of T cells is expanded at most 30,000-fold at day 21 of the expansion. In some embodiments, the population of T cells is expanded at most 40,000-fold at day 21 of the expansion. In some embodiments, the population of T cells is expanded at most 50,000-fold at day 21 of the expansion. In some embodiments, the population of T cells is expanded at most 60,000-fold at day 21 of the expansion. In some embodiments, the population of T cells is expanded at most 70,000-fold at day 21 of the expansion. In some embodiments, the population of T cells is expanded at most 80,000-fold at day 21 of the expansion. In some embodiments, the population of T cells is expanded at most 90,000-fold at day 21 of the expansion. In some embodiments, the population of T cells is expanded at most 100,000-fold at day 21 of the expansion. In some embodiments, the population of T cells is expanded at most 110,000-fold at day 21 of the expansion. In some embodiments, the population of T cells is expanded at most 120,000-fold at day 21 of the expansion. In some embodiments, the population of T cells is expanded at most 130,000-fold at day 21 of the expansion. In some embodiments, the population of T cells is expanded at most 140,000-fold at day 21 of the expansion. In some embodiments, the population of T cells is expanded at most 150,000-fold at day 21 of the expansion. In some embodiments, the population of T cells is expanded at most 200,000-fold at day 21 of the expansion. In some embodiments, the population of T cells is expanded at most 300,000-fold at day 21 of the expansion. In some embodiments, the population of T cells is expanded at most 400,000-fold at day 21 of the expansion.

[0345] In some embodiments, the population of T cells is expanded to produce an expanded population of T cells, wherein at least 2% of the expanded population expresses a recombinant protein encoded by the nucleic acid introduced into the T cells by electroporation. In some embodiments, the population of T cells is expanded to produce an expanded population of T cells, wherein at least 3% of the expanded population expresses a recombinant protein encoded by the nucleic acid introduced into the T cells by electroporation. In some embodiments, the population of T cells is expanded to produce an expanded population of T cells, wherein at least 4% of the expanded population expresses a recombinant protein encoded by the nucleic acid introduced into the T cells by electroporation. In some embodiments, the population of T cells is expanded to produce an expanded population of T cells, wherein at least 5% of the expanded population expresses a recombinant protein encoded by the nucleic acid introduced into the T cells by electroporation. In some embodiments, the population of T cells is expanded to produce an expanded population of T cells, wherein at least 6% of the expanded population expresses a recombinant protein encoded by the nucleic acid introduced into the T cells by electroporation. In some embodiments, the population of T cells is expanded to produce an expanded population of T cells, wherein at least 7% of the expanded population expresses a recombinant protein encoded by the nucleic acid introduced into the T cells by electroporation. In some embodiments, the population of T cells is expanded to produce an expanded population of T cells, wherein at least 8% of the expanded population expresses a recombinant protein encoded by the nucleic acid introduced into the T cells by electroporation. In some embodiments, the population of T cells is expanded to produce an expanded population of T cells, wherein at least 9% of the expanded population expresses a recombinant protein encoded by the nucleic acid introduced into the T cells by electroporation. In some embodiments, the population of T cells is expanded to produce an expanded population of T cells, wherein at least 10% of the expanded population expresses a recombinant protein encoded by the nucleic acid introduced into the T cells by electroporation. In some embodiments, the population of T cells is expanded to produce an expanded population of T cells, wherein at least 15% of the expanded population expresses a recombinant protein encoded by the nucleic acid introduced into the T cells by electroporation. In some embodiments, the population of T cells is expanded to produce an expanded population of T cells, wherein at least 20% of the expanded population expresses a recombinant protein encoded by the nucleic acid introduced into the T cells by electroporation. In some embodiments, the population of T cells is expanded to produce an expanded population of T cells, wherein at least 25% of the expanded population expresses a recombinant protein encoded by the nucleic acid introduced into the T cells by electroporation. In some embodiments, the population of T cells is expanded to produce an expanded population of T cells, wherein at least 30% of the expanded population expresses a recombinant protein encoded by the nucleic acid introduced into the T cells by electroporation. In some embodiments, the population of T cells is expanded to produce an expanded population of T cells, wherein at least 35% of the expanded population expresses a recombinant protein encoded by the nucleic acid introduced into the T cells by electroporation. In some embodiments, the population of T cells is expanded to produce an expanded population of T cells, wherein at least 40% of the expanded population expresses a recombinant protein encoded by the nucleic acid introduced into the T cells by electroporation. In some embodiments, the recombinant protein is a TCR, an IL-15 (e.g., mbIL15), or both. In some embodiments, the recombinant protein is detected in the expanded T cells by flow cytometry. In some embodiments, the recombinant protein in detected in the expanded T cells prior to an enrichment step.

[0346] In another aspect, the present disclosure provides a population of engineered T cells, wherein most of the engineered T cells in the population comprise an exogenous TCR or functional fragment thereof, and wherein more than 2%. 3%. 4%, 5%, 6%, 7%, 8%, 9%, 10%, 15%, 20%, 25%, 30%, 35% or 40% of the population of engineered T cells are CCR7+/CD45RO+. In another aspect, the present disclosure provides a population of engineered T cells, wherein most of the engineered T cells in the population comprise an exogenous TCR or functional fragment thereof, and wherein more than 2%, 3%, 4%, 5%, 6%, 7%, 8%, 9%, 10%, 15%, 20%, 25%, 30%, 35% or 40% of the population of engineered T cells are memory T cells (e.g., a central memory T cell, an effector memory T cell, a stem cell-like memory T cells). In some embodiments, the T cells are electroporated with a vector that expresses the exogenous TCR or functional fragment thereof. In some embodiments, the T cells are cultured and/or expanded according to any of the methods provided herein.

[0347] In another aspect, the present disclosure provides a population of engineered T cells, wherein most of the engineered T cells in the population comprise an exogenous TCR or functional fragment thereof, and wherein more than 2%, 3%, 4%, 5%, 6%, 7%, 8%, 9%, 10%, 15%, 20%, 25%, 30%, 35% or 40% of the population of engineered T cells are CD95+/CD62L+. In another aspect, the present disclosure provides a population of engineered T cells, wherein most of the engineered T cells in the population comprise an exogenous TCR or functional fragment thereof, and wherein more than 2%, 3%, 4%, 5%, 6%, 7%, 8%, 9%, 10%, 15%, 20%, 25%, 30%, 35% or 40% of the population of engineered T cells are memory T cells (e.g., a central memory T cell, an effector memory T cell, a stem cell memory T cells). In some embodiments, the T cells are electroporated with a vector that expresses the exogenous TCR or functional fragment thereof. In some embodiments, the T cells are cultured and/or expanded according to any of the methods provided herein.

a. T-Cell Stimulating Cytokines

[0348] The T-cell stimulating cytokine can be any cytokine effective in stimulating T-cells. In some embodiments, the T cell-stimulating cytokine is IL-2, IL-7, IL-12, IL-15 and/or IL-21.

[0349] In some embodiments, the methods disclosed herein comprise contacting the electroporated T cells with the cytokine IL-15. In some embodiments, the T cells are contacted with the cytokine IL-15 every other day. In some embodiments, the T cells are contacted with the cytokine IL-15 in time intervals of 2, 3, 4, 5, or 6 days. In some embodiments, the T cells are contacted with the cytokine IL-15 in a time interval of 2 days. In some embodiments, the T cells are contacted with the cytokine IL-15 in a time interval of 3 days. In some embodiments, the T cells are contacted with the cytokine IL-15 in a time interval of 4 days. In some embodiments, the T cells are contacted with the cytokine IL-15 in a time interval of 5 days. In some embodiments, the T cells are contacted with the cytokine IL-15 in a time interval of 6 days.

[0350] Concentrations of T-cell stimulating cytokines are expressed either as ng/ml or U (“units”)/ml, herein. The terms International Units (IU) and units are used interchangeably, herein. Conversion of units between ng/ml and U/ml can vary based on the cytokine used or even the source of a given cytokine. In some embodiments, 2 U/ml of T-cell stimulating cytokine would be the equivalent of 1 ng/ml of T-cell stimulating cytokine. Thus, 20 U/ml of T-cell stimulating cytokine would be the equivalent of 10 ng/ml of T-cell stimulating cytokine, etc. In some embodiments, about 2 U/ml of T-cell stimulating cytokine would be the equivalent of about 1 ng/ml of T-cell stimulating cytokine. As provided above, in some embodiments, the T cell-stimulating cytokine is IL-2, IL-7, IL-12, IL-15 and/or IL-21. In some embodiments, the conversion provided herein can vary by up to 20% more or less. For example, in some embodiments, 1 unit/ml is the equivalent of 1.6 mg/ml-2.4 mg/ml. In some embodiments, the conversion provided herein can vary by up to 10% more or less. For example, in some embodiments, 1 unit/ml is the equivalent of 1.8 mg/mi-2.2 mg/ml.

[0351] In some embodiments, the final concentration of the cytokine IL-15 in the cell culture media is 0.5 ng/ml to 10,000 ng/ml. In some embodiments, the final concentration of the cytokine IL-15 in the cell culture media is 10 ng/ml to 10,000 ng/ml. In some embodiments, the final concentration of the cytokine IL-15 in the cell culture media is 0.5 ng/ml to 10 ng/ml. In some embodiments, the final concentration of the cytokine IL-15 in the cell culture media is 10 ng/ml to 25 ng/ml. In some embodiments, the final concentration of the cytokine IL-15 in the cell culture media is 25 ng/ml to 50 ng/ml. In some embodiments, the final concentration of the cytokine IL-15 in the cell culture media is 50 ng/ml to 75 ng/ml. In some embodiments, the final concentration of the cytokine IL-15 in the cell culture media is 75 ng/ml to 100 ng/ml. In some embodiments, the final concentration of the cytokine IL-15 in the cell culture media is 100 ng/ml to 200 ng/ml. In some embodiments, the final concentration of the cytokine IL-15 in the cell culture media is 200 ng/ml to 300 ng/ml. In some embodiments, the final concentration of the cytokine IL-15 in the cell culture media is 300 ng/ml to 400 ng/ml. In some embodiments, the final concentration of the cytokine IL-15 in the cell culture media is 400 ng/ml to 500 ng/ml. In some embodiments, the final concentration of the cytokine IL-15 in the cell culture media is 500 ng/ml to 600 ng/ml. In some embodiments, the final concentration of the cytokine IL-15 in the cell culture media is 600 ng/ml to 700 ng/ml. In some embodiments, the final concentration of the cytokine IL-15 in the cell culture media is 700 ng/ml to 800 ng/ml. In some embodiments, the final concentration of the cytokine IL-15 in the cell culture media is 800 ng/ml to 900 ng/ml. In some embodiments, the final concentration of the cytokine IL-15 in the cell culture media is 900 ng/ml to 1000 ng/ml. In some embodiments, the final concentration of the cytokine IL-15 in the cell culture media is 1,000 ng/ml to 1,500 ng/ml. In some embodiments, the final concentration of the cytokine IL-15 in the cell culture media is 1,500 ng/ml to 2,000 ng/ml. In some embodiments, the final concentration of the cytokine IL-15 in the cell culture media is 2,000 ng/ml to 2,500 ng/ml. In some embodiments, the final concentration of the cytokine IL-15 in the cell culture media is 2,500 ng/ml to 3,000 ng/ml. In some embodiments, the final concentration of the cytokine IL-15 in the cell culture media is 3,000 ng/ml to 3,500 ng/ml. In some embodiments, the final concentration of the cytokine IL-15 in the cell culture media is 3,500 ng/ml to 4,000 ng/ml. In some embodiments, the final concentration of the cytokine IL-15 in the cell culture media is 4,000 ng/ml to 4,500 ng/ml. In some embodiments, the final concentration of the cytokine IL-15 in the cell culture media is 4,500 ng/ml to 5,000 ng/ml. In some embodiments, the final concentration of the cytokine IL-15 in the cell culture media is 5,000 ng/ml to 5,500 ng/ml. In some embodiments, the final concentration of the cytokine IL-15 in the cell culture media is 5,500 ng/ml to 6,000 ng/ml. In some embodiments, the final concentration of the cytokine IL-15 in the cell culture media is 6,000 ng/ml to 6,500 ng/ml. In some embodiments, the final concentration of the cytokine IL-15 in the cell culture media is 6,500 ng/ml to 7,000 ng/ml. In some embodiments, the final concentration of the cytokine IL-15 in the cell culture media is 7,000 ng/ml to 7,500 ng/ml. In some embodiments, the final concentration of the cytokine IL-15 in the cell culture media is 7,500 ng/ml to 8,000 ng/ml. In some embodiments, the final concentration of the cytokine IL-15 in the cell culture media is 8,000 ng/ml to 8,500 ng/ml. In some embodiments, the final concentration of the cytokine IL-15 in the cell culture media is 8,500 ng/ml to 9,000 ng/ml. In some embodiments, the final concentration of the cytokine IL-15 in the cell culture media is 9,000 ng/ml to 9,500 ng/ml. In some embodiments, the final concentration of the cytokine IL-15 in the cell culture media is 9,500 ng/ml to 10,000 ng/ml.

[0352] In some embodiments, the final concentration of the cytokine IL-15 in the cell culture media is 1 U/ml to 20,000 U/ml. In some embodiments, the final concentration of the cytokine IL-15 in the cell culture media is 2 U/ml to 20,000 U/ml. In some embodiments, the final concentration of the cytokine IL-15 in the cell culture media is 20 U/ml to 20,000 U/ml. In some embodiments, the final concentration of the cytokine IL-15 in the cell culture media is 2 U/ml to 20 U/ml. In some embodiments, the final concentration of the cytokine IL-15 in the cell culture media is 20 U/ml to 50 U/ml. In some embodiments, the final concentration of the cytokine IL-15 in the cell culture media is 50 U/ml to 100 U/ml. In some embodiments, the final concentration of the cytokine IL-15 in the cell culture media is 100 U/ml to 150 U/ml. In some embodiments, the final concentration of the cytokine IL-15 in the cell culture media is 150 U/ml to 200 U/ml. In some embodiments, the final concentration of the cytokine IL-15 in the cell culture media is 200 U/ml to 400 U/ml. In some embodiments, the final concentration of the cytokine IL-15 in the cell culture media is 400 U/ml to 600 U/ml. In some embodiments, the final concentration of the cytokine IL-15 in the cell culture media is 600 U/ml to 800 U/ml. In some embodiments, the final concentration of the cytokine IL-15 in the cell culture media is 800 U/ml to 1000 U/ml. In some embodiments, the final concentration of the cytokine IL-15 in the cell culture media is 1000 U/ml to 1200 U/ml. In some embodiments, the final concentration of the cytokine IL-15 in the cell culture media is 1200 U/ml to 1400 U/ml. In some embodiments, the final concentration of the cytokine IL-15 in the cell culture media is 1400 U/ml to 1600 U/ml. In some embodiments, the final concentration of the cytokine IL-15 in the cell culture media is 1600 U/ml to 1800 U/ml. In some embodiments, the final concentration of the cytokine IL-15 in the cell culture media is 1800 U/ml to 2000 U/ml. In some embodiments, the final concentration of the cytokine IL-15 in the cell culture media is 2000 U/ml to 3000 U/ml. In some embodiments, the final concentration of the cytokine IL-15 in the cell culture media is 3000 U/ml to 4000 U/ml. In some embodiments, the final concentration of the cytokine IL-15 in the cell culture media is 4000 U/ml to 5000 U/ml. In some embodiments, the final concentration of the cytokine IL-15 in the cell culture media is 5000 U/ml to 6000 U/ml. In some embodiments, the final concentration of the cytokine IL-15 in the cell culture media is 6000 U/ml to 7000 U/ml. In some embodiments, the final concentration of the cytokine IL-15 in the cell culture media is 7000 U/ml to 8000 U/ml. In some embodiments, the final concentration of the cytokine IL-15 in the cell culture media is 8000 U/ml to 9000 U/ml. In some embodiments, the final concentration of the cytokine IL-15 in the cell culture media is 9000 U/ml to 10,000 U/ml. In some embodiments, the final concentration of the cytokine IL-15 in the cell culture media is 10,000 U/ml to 11,000 U/ml. In some embodiments, the final concentration of the cytokine IL-15 in the cell culture media is 11,000 U/ml to 12,000 U/ml. In some embodiments, the final concentration of the cytokine IL-15 in the cell culture media is 12,000 U/ml to 13,000 U/ml. In some embodiments, the final concentration of the cytokine IL-15 in the cell culture media is 13,000 U/ml to 14,000 U/ml. In some embodiments, the final concentration of the cytokine IL-15 in the cell culture media is 14,000 U/ml to 15,000 U/ml. In some embodiments, the final concentration of the cytokine IL-15 in the cell culture media is 15,000 U/ml to 16,000 U/ml. In some embodiments, the final concentration of the cytokine IL-15 in the cell culture media is 16,000 U/ml to 17,000 U/ml. In some embodiments, the final concentration of the cytokine IL-15 in the cell culture media is 17,000 U/ml to 18,000 U/ml. In some embodiments, the final concentration of the cytokine IL-15 in the cell culture media is 18,000 U/ml to 19,000 U/ml. In some embodiments, the final concentration of the cytokine IL-15 in the cell culture media is 19,000 U/ml to 20,000 U/ml.

[0353] In some embodiments, the methods disclosed herein comprise contacting the electroporated T cells with the cytokine IL-7. In some embodiments, the T cells are contacted with the cytokine IL-7 every other day. In some embodiments, the T cells are contacted with the cytokine IL-7 in time intervals of 2, 3, 4, 5, or 6 days. In some embodiments, the T cells are contacted with the cytokine IL-7 in a time interval of 2 days. In some embodiments, the T cells are contacted with the cytokine IL-7 in a time interval of 3 days. In some embodiments, the T cells are contacted with the cytokine IL-7 in a time interval of 4 days. In some embodiments, the T cells are contacted with the cytokine IL-7 in a time interval of 5 days. In some embodiments, the T cells are contacted with the cytokine IL-7 in a time interval of 6 days.

[0354] In some embodiments, the final concentration of the cytokine IL-7 in the cell culture media is 0.5 ng/ml to 10,000 ng/ml. In some embodiments, the final concentration of the cytokine IL-7 in the cell culture media is 10 ng/ml to 10,000 ng/ml. In some embodiments, the final concentration of the cytokine IL-7 in the cell culture media is 0.5 ng/ml to 10 ng/ml. In some embodiments, the final concentration of the cytokine IL-7 in the cell culture media is 10 ng/ml to 25 ng/ml. In some embodiments, the final concentration of the cytokine IL-7 in the cell culture media is 25 ng/ml to 50 ng/ml. In some embodiments, the final concentration of the cytokine IL-7 in the cell culture media is 50 ng/ml to 75 ng/ml. In some embodiments, the final concentration of the cytokine IL-7 in the cell culture media is 75 ng/ml to 100 ng/ml. In some embodiments, the final concentration of the cytokine IL-7 in the cell culture media is 100 ng/ml to 200 ng/ml. In some embodiments, the final concentration of the cytokine IL-7 in the cell culture media is 200 ng/ml to 300 ng/ml. In some embodiments, the final concentration of the cytokine IL-7 in the cell culture media is 300 ng/ml to 400 ng/ml. In some embodiments, the final concentration of the cytokine IL-7 in the cell culture media is 400 ng/ml to 500 ng/ml. In some embodiments, the final concentration of the cytokine IL-7 in the cell culture media is 500 ng/ml to 600 ng/ml. In some embodiments, the final concentration of the cytokine IL-7 in the cell culture media is 600 ng/ml to 700 ng/ml. In some embodiments, the final concentration of the cytokine IL-7 in the cell culture media is 700 ng/ml to 800 ng/ml. In some embodiments, the final concentration of the cytokine IL-7 in the cell culture media is 800 ng/ml to 900 ng/ml. In some embodiments, the final concentration of the cytokine IL-7 in the cell culture media is 900 ng/ml to 1000 ng/ml. In some embodiments, the final concentration of the cytokine IL-7 in the cell culture media is 1,000 ng/ml to 1,500 ng/ml. In some embodiments, the final concentration of the cytokine IL-7 in the cell culture media is 1,500 ng/ml to 2,000 ng/ml. In some embodiments, the final concentration of the cytokine IL-7 in the cell culture media is 2,000 ng/ml to 2,500 ng/ml. In some embodiments, the final concentration of the cytokine IL-7 in the cell culture media is 2,500 ng/ml to 3,000 ng/ml. In some embodiments, the final concentration of the cytokine IL-7 in the cell culture media is 3,000 ng/ml to 3,500 ng/ml. In some embodiments, the final concentration of the cytokine IL-7 in the cell culture media is 3,500 ng/ml to 4,000 ng/ml. In some embodiments, the final concentration of the cytokine IL-7 in the cell culture media is 4,000 ng/ml to 4,500 ng/ml. In some embodiments, the final concentration of the cytokine IL-7 in the cell culture media is 4,500 ng/ml to 5,000 ng/ml. In some embodiments, the final concentration of the cytokine IL-7 in the cell culture media is 5,000 ng/ml to 5,500 ng/ml. In some embodiments, the final concentration of the cytokine IL-7 in the cell culture media is 5,500 ng/ml to 6,000 ng/ml. In some embodiments, the final concentration of the cytokine IL-7 in the cell culture media is 6,000 ng/ml to 6,500 ng/ml. In some embodiments, the final concentration of the cytokine IL-7 in the cell culture media is 6,500 ng/ml to 7,000 ng/ml. In some embodiments, the final concentration of the cytokine IL-7 in the cell culture media is 7,000 ng/ml to 7,500 ng/ml. In some embodiments, the final concentration of the cytokine IL-7 in the cell culture media is 7,500 ng/ml to 8,000 ng/ml. In some embodiments, the final concentration of the cytokine IL-7 in the cell culture media is 8,000 ng/ml to 8,500 ng/ml. In some embodiments, the final concentration of the cytokine IL-7 in the cell culture media is 8,500 ng/ml to 9,000 ng/ml. In some embodiments, the final concentration of the cytokine IL-7 in the cell culture media is 9,000 ng/ml to 9,500 ng/ml. In some embodiments, the final concentration of the cytokine IL-7 in the cell culture media is 9,500 ng/ml to 10,000 ng/ml.

[0355] In some embodiments, the final concentration of the cytokine IL-7 in the cell culture media is 1 U/ml to 20,000 U/ml. In some embodiments, the final concentration of the cytokine IL-7 in the cell culture media is 2 U/ml to 20,000 U/ml. In some embodiments, the final concentration of the cytokine IL-7 in the cell culture media is 20 U/ml to 20,000 U/ml. In some embodiments, the final concentration of the cytokine IL-7 in the cell culture media is 2 U/ml to 20 U/ml. In some embodiments, the final concentration of the cytokine IL-7 in the cell culture media is 20 U/ml to 50 U/ml. In some embodiments, the final concentration of the cytokine IL-7 in the cell culture media is 50 U/ml to 100 U/ml. In some embodiments, the final concentration of the cytokine IL-7 in the cell culture media is 100 Um′ to 150 U/ml. In some embodiments, the final concentration of the cytokine IL-7 in the cell culture media is 150 Um′ to 200 U/ml. In some embodiments, the final concentration of the cytokine IL-7 in the cell culture media is 200 U/ml to 400 U/ml. In some embodiments, the final concentration of the cytokine IL-7 in the cell culture media is 400 U/ml to 600 U/ml. In some embodiments, the final concentration of the cytokine IL-7 in the cell culture media is 600 U/ml to 800 U/ml. In some embodiments, the final concentration of the cytokine IL-7 in the cell culture media is 800 U/ml to 1000 U/ml. In some embodiments, the final concentration of the cytokine IL-7 in the cell culture media is 1000 U/ml to 1200 U/ml. In some embodiments, the final concentration of the cytokine IL-7 in the cell culture media is 1200 U/ml to 1400 U/ml. In some embodiments, the final concentration of the cytokine IL-7 in the cell culture media is 1400 Um′ to 1600 U/ml. In some embodiments, the final concentration of the cytokine IL-7 in the cell culture media is 1600 U/ml to 1800 U/ml. In some embodiments, the final concentration of the cytokine IL-7 in the cell culture media is 1800 U/ml to 2000 U/ml. In some embodiments, the final concentration of the cytokine IL-7 in the cell culture media is 2000 U/ml to 3000 U/ml. In some embodiments, the final concentration of the cytokine IL-7 in the cell culture media is 3000 U/ml to 4000 U/ml. In some embodiments, the final concentration of the cytokine IL-7 in the cell culture media is 4000 U/ml to 5000 U/ml. In some embodiments, the final concentration of the cytokine IL-7 in the cell culture media is 5000 U/ml to 6000 U/ml. In some embodiments, the final concentration of the cytokine IL-7 in the cell culture media is 6000 U/ml to 7000 U/ml. In some embodiments, the final concentration of the cytokine IL-7 in the cell culture media is 7000 U/ml to 8000 U/ml. In some embodiments, the final concentration of the cytokine IL-7 in the cell culture media is 8000 U/ml to 9000 U/ml. In some embodiments, the final concentration of the cytokine IL-7 in the cell culture media is 9000 U/ml to 10,000 U/ml. In some embodiments, the final concentration of the cytokine IL-7 in the cell culture media is 10,000 U/ml to 11,000 U/ml. In some embodiments, the final concentration of the cytokine IL-7 in the cell culture media is 11,000 U/ml to 12,000 U/ml. In some embodiments, the final concentration of the cytokine IL-7 in the cell culture media is 12,000 U/ml to 13,000 U/ml. In some embodiments, the final concentration of the cytokine IL-7 in the cell culture media is 13,000 U/ml to 14,000 U/ml. In some embodiments, the final concentration of the cytokine IL-7 in the cell culture media is 14,000 U/ml to 15,000 U/ml. In some embodiments, the final concentration of the cytokine IL-7 in the cell culture media is 15,000 U/ml to 16,000 U/ml. In some embodiments, the final concentration of the cytokine IL-7 in the cell culture media is 16,000 U/ml to 17,000 U/ml. In some embodiments, the final concentration of the cytokine IL-7 in the cell culture media is 17,000 U/ml to 18,000 U/ml. In some embodiments, the final concentration of the cytokine IL-7 in the cell culture media is 18,000 U/ml to 19,000 U/ml. In some embodiments, the final concentration of the cytokine IL-7 in the cell culture media is 19,000 U/ml to 20,000 U/ml.

[0356] In some embodiments, the methods disclosed herein comprise contacting the electroporated T cells with the cytokine IL-12. In some embodiments, the T cells are contacted with the cytokine IL-12 every other day. In some embodiments, the T cells are contacted with the cytokine IL-12 in time intervals of 2, 3, 4, 5, or 6 days. In some embodiments, the T cells are contacted with the cytokine IL-12 in a time interval of 2 days. In some embodiments, the T cells are contacted with the cytokine IL-12 in a time interval of 3 days. In some embodiments, the T cells are contacted with the cytokine IL-12 in a time interval of 4 days. In some embodiments, the T cells are contacted with the cytokine IL-12 in a time interval of 5 days. In some embodiments, the T cells are contacted with the cytokine IL-12 in a time interval of 6 days.

[0357] In some embodiments, the final concentration of the cytokine IL-12 in the cell culture media is 0.5 ng/ml to 10,000 ng/ml. In some embodiments, the final concentration of the cytokine IL-12 in the cell culture media is 10 ng/ml to 10,000 ng/ml. In some embodiments, the final concentration of the cytokine IL-12 in the cell culture media is 0.5 ng/ml to 10 ng/ml. In some embodiments, the final concentration of the cytokine IL-12 in the cell culture media is 10 ng/ml to 25 ng/ml. In some embodiments, the final concentration of the cytokine IL-12 in the cell culture media is 25 ng/ml to 50 ng/ml. In some embodiments, the final concentration of the cytokine IL-12 in the cell culture media is 50 ng/ml to 75 ng/ml. In some embodiments, the final concentration of the cytokine IL-12 in the cell culture media is 75 ng/ml to 100 ng/ml. In some embodiments, the final concentration of the cytokine IL-12 in the cell culture media is 100 ng/ml to 200 ng/ml. In some embodiments, the final concentration of the cytokine IL-12 in the cell culture media is 200 ng/ml to 300 ng/ml. In some embodiments, the final concentration of the cytokine IL-12 in the cell culture media is 300 ng/ml to 400 ng/ml. In some embodiments, the final concentration of the cytokine IL-12 in the cell culture media is 400 ng/ml to 500 ng/ml. In some embodiments, the final concentration of the cytokine IL-12 in the cell culture media is 500 ng/ml to 600 ng/ml. In some embodiments, the final concentration of the cytokine IL-12 in the cell culture media is 600 ng/ml to 700 ng/ml. In some embodiments, the final concentration of the cytokine IL-12 in the cell culture media is 700 ng/ml to 800 ng/ml. In some embodiments, the final concentration of the cytokine IL-12 in the cell culture media is 800 ng/ml to 900 ng/ml. In some embodiments, the final concentration of the cytokine IL-12 in the cell culture media is 900 ng/ml to 1000 ng/ml. In some embodiments, the final concentration of the cytokine IL-12 in the cell culture media is 1,000 ng/ml to 1,500 ng/ml. In some embodiments, the final concentration of the cytokine IL-12 in the cell culture media is 1,500 ng/ml to 2,000 ng/ml. In some embodiments, the final concentration of the cytokine IL-12 in the cell culture media is 2,000 ng/ml to 2,500 ng/ml. In some embodiments, the final concentration of the cytokine IL-12 in the cell culture media is 2,500 ng/ml to 3,000 ng/ml. In some embodiments, the final concentration of the cytokine IL-12 in the cell culture media is 3,000 ng/ml to 3,500 ng/ml. In some embodiments, the final concentration of the cytokine IL-12 in the cell culture media is 3,500 ng/ml to 4,000 ng/ml. In some embodiments, the final concentration of the cytokine IL-12 in the cell culture media is 4,000 ng/ml to 4,500 ng/ml. In some embodiments, the final concentration of the cytokine IL-12 in the cell culture media is 4,500 ng/ml to 5,000 ng/ml. In some embodiments, the final concentration of the cytokine IL-12 in the cell culture media is 5,000 ng/ml to 5,500 ng/ml. In some embodiments, the final concentration of the cytokine IL-12 in the cell culture media is 5,500 ng/ml to 6,000 ng/ml. In some embodiments, the final concentration of the cytokine IL-12 in the cell culture media is 6,000 ng/ml to 6,500 ng/ml. In some embodiments, the final concentration of the cytokine IL-12 in the cell culture media is 6,500 ng/ml to 7,000 ng/ml. In some embodiments, the final concentration of the cytokine IL-12 in the cell culture media is 7,000 ng/ml to 7,500 ng/ml. In some embodiments, the final concentration of the cytokine IL-12 in the cell culture media is 7,500 ng/ml to 8,000 ng/ml. In some embodiments, the final concentration of the cytokine IL-12 in the cell culture media is 8,000 ng/ml to 8,500 ng/ml. In some embodiments, the final concentration of the cytokine IL-12 in the cell culture media is 8,500 ng/ml to 9,000 ng/ml. In some embodiments, the final concentration of the cytokine IL-12 in the cell culture media is 9,000 ng/ml to 9,500 ng/ml. In some embodiments, the final concentration of the cytokine IL-12 in the cell culture media is 9,500 ng/ml to 10,000 ng/ml.

[0358] In some embodiments, the final concentration of the cytokine IL-12 in the cell culture media is 1 U/ml to 20,000 U/ml. In some embodiments, the final concentration of the cytokine IL-12 in the cell culture media is 2 U/ml to 20,000 U/ml. In some embodiments, the final concentration of the cytokine IL-12 in the cell culture media is 20 U/ml to 20,000 U/ml. In some embodiments, the final concentration of the cytokine IL-12 in the cell culture media is 2 U/ml to 20 U/ml. In some embodiments, the final concentration of the cytokine IL-12 in the cell culture media is 20 U/ml to 50 U/ml. In some embodiments, the final concentration of the cytokine IL-12 in the cell culture media is 50 U/ml to 100 U/ml. In some embodiments, the final concentration of the cytokine IL-12 in the cell culture media is 100 U/ml to 150 U/ml. In some embodiments, the final concentration of the cytokine IL-12 in the cell culture media is 150 U/ml to 200 U/ml. In some embodiments, the final concentration of the cytokine IL-12 in the cell culture media is 200 U/ml to 400 U/ml. In some embodiments, the final concentration of the cytokine IL-12 in the cell culture media is 400 U/ml to 600 U/ml. In some embodiments, the final concentration of the cytokine IL-12 in the cell culture media is 600 U/ml to 800 U/ml. In some embodiments, the final concentration of the cytokine IL-12 in the cell culture media is 800 U/ml to 1000 U/ml. In some embodiments, the final concentration of the cytokine IL-12 in the cell culture media is 1000 U/ml to 1200 U/ml. In some embodiments, the final concentration of the cytokine IL-12 in the cell culture media is 1200 U/ml to 1400 U/ml. In some embodiments, the final concentration of the cytokine IL-12 in the cell culture media is 1400 U/ml to 1600 U/ml. In some embodiments, the final concentration of the cytokine IL-12 in the cell culture media is 1600 U/ml to 1800 U/ml. In some embodiments, the final concentration of the cytokine IL-12 in the cell culture media is 1800 U/ml to 2000 U/ml. In some embodiments, the final concentration of the cytokine IL-12 in the cell culture media is 2000 U/ml to 3000 U/ml. In some embodiments, the final concentration of the cytokine IL-12 in the cell culture media is 3000 U/ml to 4000 U/ml. In some embodiments, the final concentration of the cytokine IL-12 in the cell culture media is 4000 U/ml to 5000 U/ml. In some embodiments, the final concentration of the cytokine IL-12 in the cell culture media is 5000 U/ml to 6000 U/ml. In some embodiments, the final concentration of the cytokine IL-12 in the cell culture media is 6000 U/ml to 7000 U/ml. In some embodiments, the final concentration of the cytokine IL-12 in the cell culture media is 7000 U/ml to 8000 U/ml. In some embodiments, the final concentration of the cytokine IL-12 in the cell culture media is 8000 U/ml to 9000 U/ml. In some embodiments, the final concentration of the cytokine IL-12 in the cell culture media is 9000 U/ml to 10,000 U/ml. In some embodiments, the final concentration of the cytokine IL-12 in the cell culture media is 10,000 U/ml to 11,000 U/ml. In some embodiments, the final concentration of the cytokine IL-12 in the cell culture media is 11,000 U/ml to 12,000 U/ml. In some embodiments, the final concentration of the cytokine IL-12 in the cell culture media is 12,000 U/ml to 13,000 U/ml. In some embodiments, the final concentration of the cytokine IL-12 in the cell culture media is 13,000 U/ml to 14,000 U/ml. In some embodiments, the final concentration of the cytokine IL-12 in the cell culture media is 14,000 U/ml to 15,000 U/ml. In some embodiments, the final concentration of the cytokine IL-12 in the cell culture media is 15,000 U/ml to 16,000 U/ml. In some embodiments, the final concentration of the cytokine IL-12 in the cell culture media is 16,000 U/ml to 17,000 U/ml. In some embodiments, the final concentration of the cytokine IL-12 in the cell culture media is 17,000 U/ml to 18,000 U/ml. In some embodiments, the final concentration of the cytokine IL-12 in the cell culture media is 18,000 U/ml to 19,000 U/ml. In some embodiments, the final concentration of the cytokine IL-12 in the cell culture media is 19,000 U/ml to 20,000 U/ml.

[0359] In some embodiments, the methods disclosed herein comprise contacting the electroporated T cells with the cytokine IL-21. In some embodiments, the T cells are contacted with the cytokine IL-21 every other day. In some embodiments, the T cells are contacted with the cytokine IL-21 in time intervals of 2, 3, 4, 5, or 6 days. In some embodiments, the T cells are contacted with the cytokine IL-21 in a time interval of 2 days. In some embodiments, the T cells are contacted with the cytokine IL-21 in a time interval of 3 days. In some embodiments, the T cells are contacted with the cytokine IL-21 in a time interval of 4 days. In some embodiments, the T cells are contacted with the cytokine IL-21 in a time interval of 5 days. In some embodiments, the T cells are contacted with the cytokine IL-21 in a time interval of 6 days.

[0360] In some embodiments, the final concentration of the cytokine IL-21 in the cell culture media is 0.5 ng/ml to 10,000 ng/ml. In some embodiments, the final concentration of the cytokine IL-21 in the cell culture media is 10 ng/ml to 10,000 ng/ml. In some embodiments, the final concentration of the cytokine IL-21 in the cell culture media is 0.5 ng/ml to 10 ng/ml. In some embodiments, the final concentration of the cytokine IL-21 in the cell culture media is 10 ng/ml to 25 ng/ml. In some embodiments, the final concentration of the cytokine IL-21 in the cell culture media is 25 ng/ml to 50 ng/ml. In some embodiments, the final concentration of the cytokine IL-21 in the cell culture media is 50 ng/ml to 75 ng/ml. In some embodiments, the final concentration of the cytokine IL-21 in the cell culture media is 75 ng/ml to 100 ng/ml. In some embodiments, the final concentration of the cytokine IL-21 in the cell culture media is 100 ng/ml to 200 ng/ml. In some embodiments, the final concentration of the cytokine IL-21 in the cell culture media is 200 ng/ml to 300 ng/ml. In some embodiments, the final concentration of the cytokine IL-21 in the cell culture media is 300 ng/ml to 400 ng/ml. In some embodiments, the final concentration of the cytokine IL-21 in the cell culture media is 400 ng/ml to 500 ng/ml. In some embodiments, the final concentration of the cytokine IL-21 in the cell culture media is 500 ng/ml to 600 ng/ml. In some embodiments, the final concentration of the cytokine IL-21 in the cell culture media is 600 ng/ml to 700 ng/ml. In some embodiments, the final concentration of the cytokine IL-21 in the cell culture media is 700 ng/ml to 800 ng/ml. In some embodiments, the final concentration of the cytokine IL-21 in the cell culture media is 800 ng/ml to 900 ng/ml. In some embodiments, the final concentration of the cytokine IL-21 in the cell culture media is 900 ng/ml to 1000 ng/ml. In some embodiments, the final concentration of the cytokine IL-21 in the cell culture media is 1,000 ng/ml to 1,500 ng/ml. In some embodiments, the final concentration of the cytokine IL-21 in the cell culture media is 1,500 ng/ml to 2,000 ng/ml. In some embodiments, the final concentration of the cytokine IL-21 in the cell culture media is 2,000 ng/ml to 2,500 ng/ml. In some embodiments, the final concentration of the cytokine IL-21 in the cell culture media is 2,500 ng/ml to 3,000 ng/ml. In some embodiments, the final concentration of the cytokine IL-21 in the cell culture media is 3,000 ng/ml to 3,500 ng/ml. In some embodiments, the final concentration of the cytokine IL-21 in the cell culture media is 3,500 ng/ml to 4,000 ng/ml. In some embodiments, the final concentration of the cytokine IL-21 in the cell culture media is 4,000 ng/ml to 4,500 ng/ml. In some embodiments, the final concentration of the cytokine IL-21 in the cell culture media is 4,500 ng/ml to 5,000 ng/ml. In some embodiments, the final concentration of the cytokine IL-21 in the cell culture media is 5,000 ng/ml to 5,500 ng/ml. In some embodiments, the final concentration of the cytokine IL-21 in the cell culture media is 5,500 ng/ml to 6,000 ng/ml. In some embodiments, the final concentration of the cytokine IL-21 in the cell culture media is 6,000 ng/ml to 6,500 ng/ml. In some embodiments, the final concentration of the cytokine IL-21 in the cell culture media is 6,500 ng/ml to 7,000 ng/ml. In some embodiments, the final concentration of the cytokine IL-21 in the cell culture media is 7,000 ng/ml to 7,500 ng/ml. In some embodiments, the final concentration of the cytokine IL-21 in the cell culture media is 7,500 ng/ml to 8,000 ng/ml. In some embodiments, the final concentration of the cytokine IL-21 in the cell culture media is 8,000 ng/ml to 8,500 ng/ml. In some embodiments, the final concentration of the cytokine IL-21 in the cell culture media is 8,500 ng/ml to 9,000 ng/ml. In some embodiments, the final concentration of the cytokine IL-21 in the cell culture media is 9,000 ng/ml to 9,500 ng/ml. In some embodiments, the final concentration of the cytokine IL-21 in the cell culture media is 9,500 ng/ml to 10,000 ng/ml.

[0361] In some embodiments, the final concentration of the cytokine IL-21 in the cell culture media is 1 U/ml to 20,000 U/ml. In some embodiments, the final concentration of the cytokine IL-21 in the cell culture media is 2 U/ml to 20,000 U/ml. In some embodiments, the final concentration of the cytokine IL-21 in the cell culture media is 20 U/ml to 20,000 U/ml. In some embodiments, the final concentration of the cytokine IL-21 in the cell culture media is 2 U/ml to 20 U/ml. In some embodiments, the final concentration of the cytokine IL-21 in the cell culture media is 20 U/ml to 50 U/ml. In some embodiments, the final concentration of the cytokine IL-21 in the cell culture media is 50 U/ml to 100 U/ml. In some embodiments, the final concentration of the cytokine IL-21 in the cell culture media is 100 U/ml to 150 U/ml. In some embodiments, the final concentration of the cytokine IL-21 in the cell culture media is 150 U/ml to 200 U/ml. In some embodiments, the final concentration of the cytokine IL-21 in the cell culture media is 200 U/ml to 400 U/ml. In some embodiments, the final concentration of the cytokine IL-21 in the cell culture media is 400 U/ml to 600 U/ml. In some embodiments, the final concentration of the cytokine IL-21 in the cell culture media is 600 U/ml to 800 U/ml. In some embodiments, the final concentration of the cytokine IL-21 in the cell culture media is 800 U/ml to 1000 U/ml. In some embodiments, the final concentration of the cytokine IL-21 in the cell culture media is 1000 U/ml to 1200 U/ml. In some embodiments, the final concentration of the cytokine IL-21 in the cell culture media is 1200 U/ml to 1400 U/ml. In some embodiments, the final concentration of the cytokine IL-21 in the cell culture media is 1400 U/ml to 1600 U/ml. In some embodiments, the final concentration of the cytokine IL-21 in the cell culture media is 1600 U/ml to 1800 U/ml. In some embodiments, the final concentration of the cytokine IL-21 in the cell culture media is 1800 U/ml to 2000 U/ml. In some embodiments, the final concentration of the cytokine IL-21 in the cell culture media is 2000 U/ml to 3000 U/ml. In some embodiments, the final concentration of the cytokine IL-21 in the cell culture media is 3000 U/ml to 4000 U/ml. In some embodiments, the final concentration of the cytokine IL-21 in the cell culture media is 4000 U/ml to 5000 U/ml. In some embodiments, the final concentration of the cytokine IL-21 in the cell culture media is 5000 U/ml to 6000 U/ml. In some embodiments, the final concentration of the cytokine IL-21 in the cell culture media is 6000 U/ml to 7000 U/ml. In some embodiments, the final concentration of the cytokine IL-21 in the cell culture media is 7000 U/ml to 8000 U/ml. In some embodiments, the final concentration of the cytokine IL-21 in the cell culture media is 8000 U/ml to 9000 U/ml. In some embodiments, the final concentration of the cytokine IL-21 in the cell culture media is 9000 U/ml to 10,000 U/ml. In some embodiments, the final concentration of the cytokine IL-21 in the cell culture media is 10,000 U/ml to 11,000 U/ml. In some embodiments, the final concentration of the cytokine IL-21 in the cell culture media is 11,000 U/ml to 12,000 U/ml. In some embodiments, the final concentration of the cytokine IL-21 in the cell culture media is 12,000 U/ml to 13,000 U/ml. In some embodiments, the final concentration of the cytokine IL-21 in the cell culture media is 13,000 U/ml to 14,000 U/ml. In some embodiments, the final concentration of the cytokine IL-21 in the cell culture media is 14,000 U/ml to 15,000 U/ml. In some embodiments, the final concentration of the cytokine IL-21 in the cell culture media is 15,000 U/ml to 16,000 U/ml. In some embodiments, the final concentration of the cytokine IL-21 in the cell culture media is 16,000 U/ml to 17,000 U/ml. In some embodiments, the final concentration of the cytokine IL-21 in the cell culture media is 17,000 U/ml to 18,000 U/ml. In some embodiments, the final concentration of the cytokine IL-21 in the cell culture media is 18,000 U/ml to 19,000 U/ml. In some embodiments, the final concentration of the cytokine IL-21 in the cell culture media is 19,000 U/ml to 20,000 U/ml.

[0362] In some embodiments, the methods disclosed herein comprise contacting the electroporated T cells with the cytokine IL-2. In some embodiments, the T cells are contacted with the cytokine IL-2 every other day. In some embodiments, the T cells are contacted with the cytokine IL-2 in time intervals of 2, 3, 4, 5, or 6 days. In some embodiments, the T cells are contacted with the cytokine IL-2 in a time interval of 2 days. In some embodiments, the T cells are contacted with the cytokine IL-2 in a time interval of 3 days. In some embodiments, the T cells are contacted with the cytokine IL-2 in a time interval of 4 days. In some embodiments, the T cells are contacted with the cytokine IL-2 in a time interval of 5 days. In some embodiments, the T cells are contacted with the cytokine IL-2 in a time interval of 6 days.

[0363] In some embodiments, the final concentration of the cytokine IL-2 in the cell culture media is 0.50 ng/ml to 10,000 ng/ml. In some embodiments, the final concentration of the cytokine IL-2 in the cell culture media is 10 ng/ml to 10,000 ng/ml. In some embodiments, the final concentration of the cytokine IL-2 in the cell culture media is 0.5 ng/ml to 10 ng/ml. In some embodiments, the final concentration of the cytokine IL-2 in the cell culture media is 10 ng/ml to 25 ng/ml. In some embodiments, the final concentration of the cytokine IL-2 in the cell culture media is 25 ng/ml to 50 ng/ml. In some embodiments, the final concentration of the cytokine IL-2 in the cell culture media is 50 ng/ml to 75 ng/ml. In some embodiments, the final concentration of the cytokine IL-2 in the cell culture media is 75 ng/ml to 100 ng/ml. In some embodiments, the final concentration of the cytokine IL-2 in the cell culture media is 100 ng/ml to 200 ng/ml. In some embodiments, the final concentration of the cytokine IL-2 in the cell culture media is 200 ng/ml to 300 ng/ml. In some embodiments, the final concentration of the cytokine IL-2 in the cell culture media is 300 ng/ml to 400 ng/ml. In some embodiments, the final concentration of the cytokine IL-2 in the cell culture media is 400 ng/ml to 500 ng/ml. In some embodiments, the final concentration of the cytokine IL-2 in the cell culture media is 500 ng/ml to 600 ng/ml. In some embodiments, the final concentration of the cytokine IL-2 in the cell culture media is 600 ng/ml to 700 ng/ml. In some embodiments, the final concentration of the cytokine IL-2 in the cell culture media is 700 ng/ml to 800 ng/ml. In some embodiments, the final concentration of the cytokine IL-2 in the cell culture media is 800 ng/ml to 900 ng/ml. In some embodiments, the final concentration of the cytokine IL-2 in the cell culture media is 900 ng/ml to 1000 ng/ml. In some embodiments, the final concentration of the cytokine IL-2 in the cell culture media is 1,000 ng/ml to 1,500 ng/ml. In some embodiments, the final concentration of the cytokine IL-2 in the cell culture media is 1,500 ng/ml to 2,000 ng/ml. In some embodiments, the final concentration of the cytokine IL-2 in the cell culture media is 2,000 ng/ml to 2,500 ng/ml. In some embodiments, the final concentration of the cytokine IL-2 in the cell culture media is 2,500 ng/ml to 3,000 ng/ml. In some embodiments, the final concentration of the cytokine IL-2 in the cell culture media is 3,000 ng/ml to 3,500 ng/ml. In some embodiments, the final concentration of the cytokine IL-2 in the cell culture media is 3,500 ng/ml to 4,000 ng/ml. In some embodiments, the final concentration of the cytokine IL-2 in the cell culture media is 4,000 ng/ml to 4,500 ng/ml. In some embodiments, the final concentration of the cytokine IL-2 in the cell culture media is 4,500 ng/ml to 5,000 ng/ml. In some embodiments, the final concentration of the cytokine IL-2 in the cell culture media is 5,000 ng/ml to 5,500 ng/ml. In some embodiments, the final concentration of the cytokine IL-2 in the cell culture media is 5,500 ng/ml to 6,000 ng/ml. In some embodiments, the final concentration of the cytokine IL-2 in the cell culture media is 6,000 ng/ml to 6,500 ng/ml. In some embodiments, the final concentration of the cytokine IL-2 in the cell culture media is 6,500 ng/ml to 7,000 ng/ml. In some embodiments, the final concentration of the cytokine IL-2 in the cell culture media is 7,000 ng/ml to 7,500 ng/ml. In some embodiments, the final concentration of the cytokine IL-2 in the cell culture media is 7,500 ng/ml to 8,000 ng/ml. In some embodiments, the final concentration of the cytokine IL-2 in the cell culture media is 8,000 ng/ml to 8,500 ng/ml. In some embodiments, the final concentration of the cytokine IL-2 in the cell culture media is 8,500 ng/ml to 9,000 ng/ml. In some embodiments, the final concentration of the cytokine IL-2 in the cell culture media is 9,000 ng/ml to 9,500 ng/ml. In some embodiments, the final concentration of the cytokine IL-2 in the cell culture media is 9,500 ng/ml to 10,000 ng/ml.

[0364] In some embodiments, the final concentration of the cytokine IL-2 in the cell culture media is 1 U/ml to 20,000 U/ml. In some embodiments, the final concentration of the cytokine IL-2 in the cell culture media is 2 U/ml to 20,000 U/ml. In some embodiments, the final concentration of the cytokine IL-2 in the cell culture media is 20 U/ml to 20,000 U/ml. In some embodiments, the final concentration of the cytokine IL-2 in the cell culture media is 2 U/ml to 20 U/ml. In some embodiments, the final concentration of the cytokine IL-2 in the cell culture media is 20 U/ml to 50 U/ml. In some embodiments, the final concentration of the cytokine IL-2 in the cell culture media is 50 U/ml to 100 U/ml. In some embodiments, the final concentration of the cytokine IL-2 in the cell culture media is 100 Um′ to 150 U/ml. In some embodiments, the final concentration of the cytokine IL-2 in the cell culture media is 150 Um′ to 200 U/ml. In some embodiments, the final concentration of the cytokine IL-2 in the cell culture media is 200 U/ml to 400 U/ml. In some embodiments, the final concentration of the cytokine IL-2 in the cell culture media is 400 U/ml to 600 U/ml. In some embodiments, the final concentration of the cytokine IL-2 in the cell culture media is 600 U/ml to 800 U/ml. In some embodiments, the final concentration of the cytokine IL-2 in the cell culture media is 800 U/ml to 1000 U/ml. In some embodiments, the final concentration of the cytokine IL-2 in the cell culture media is 1000 U/ml to 1200 U/ml. In some embodiments, the final concentration of the cytokine IL-2 in the cell culture media is 1200 U/ml to 1400 U/ml. In some embodiments, the final concentration of the cytokine IL-2 in the cell culture media is 1400 Um′ to 1600 U/ml. In some embodiments, the final concentration of the cytokine IL-2 in the cell culture media is 1600 U/ml to 1800 U/ml. In some embodiments, the final concentration of the cytokine IL-2 in the cell culture media is 1800 U/ml to 2000 U/ml. In some embodiments, the final concentration of the cytokine IL-2 in the cell culture media is 2000 U/ml to 3000 U/ml. In some embodiments, the final concentration of the cytokine IL-2 in the cell culture media is 3000 U/ml to 4000 U/ml. In some embodiments, the final concentration of the cytokine IL-2 in the cell culture media is 4000 U/ml to 5000 U/ml. In some embodiments, the final concentration of the cytokine IL-2 in the cell culture media is 5000 U/ml to 6000 U/ml. In some embodiments, the final concentration of the cytokine IL-2 in the cell culture media is 6000 U/ml to 7000 U/ml. In some embodiments, the final concentration of the cytokine IL-2 in the cell culture media is 7000 U/ml to 8000 U/ml. In some embodiments, the final concentration of the cytokine IL-2 in the cell culture media is 8000 U/ml to 9000 U/ml. In some embodiments, the final concentration of the cytokine IL-2 in the cell culture media is 9000 U/ml to 10,000 U/ml. In some embodiments, the final concentration of the cytokine IL-2 in the cell culture media is 10,000 U/ml to 11,000 U/ml. In some embodiments, the final concentration of the cytokine IL-2 in the cell culture media is 11,000 U/ml to 12,000 U/ml. In some embodiments, the final concentration of the cytokine IL-2 in the cell culture media is 12,000 U/ml to 13,000 U/ml. In some embodiments, the final concentration of the cytokine IL-2 in the cell culture media is 13,000 U/ml to 14,000 U/ml. In some embodiments, the final concentration of the cytokine IL-2 in the cell culture media is 14,000 U/ml to 15,000 U/ml. In some embodiments, the final concentration of the cytokine IL-2 in the cell culture media is 15,000 U/ml to 16,000 U/ml. In some embodiments, the final concentration of the cytokine IL-2 in the cell culture media is 16,000 U/ml to 17,000 U/ml. In some embodiments, the final concentration of the cytokine IL-2 in the cell culture media is 17,000 U/ml to 18,000 U/ml. In some embodiments, the final concentration of the cytokine IL-2 in the cell culture media is 18,000 U/ml to 19,000 U/ml. In some embodiments, the final concentration of the cytokine IL-2 in the cell culture media is 19,000 U/ml to 20,000 U/ml.

[0365] In some embodiments, the T cell stimulating cytokines are only administered to a culture media at the first day of administering the culture media to cells, but not readministered when the media is changed. In some embodiments, IL-7 is provided only on day 1 of culture. In some embodiments, IL-12 is provided only on day 1 of culture.

b. Methods of Use

[0366] In another aspect, the instant disclosure provides a method of treating a subject using the polycistronic polynucleotides, recombinant vectors, engineered cells (e.g., a cell comprising a heterologous and/or recombinant nucleic acid), or pharmaceutical compositions disclosed herein. Any disease or disorder in a subject that would benefit from treatment with a recombinant cell of the present disclosure, or a polynucleotide or vector of the present disclosure can be treated using the methods disclosed herein.

[0367] In certain embodiments, the method comprises administering to the subject an effective amount of a recombinant cell or population thereof as disclosed herein.

[0368] As disclosed infra, cells administered to the subject can be autologous or allogeneic to the subject. In certain embodiments, autologous cells are obtained from a cancer patient directly following a cancer treatment. In this regard, it has been observed that following certain cancer treatments, in particular treatments with drugs that damage the immune system, shortly after treatment during the period when patients would normally be recovering from the treatment, the quality of T cells obtained may be optimal or improved for their ability to expand ex vivo. Likewise, following ex vivo manipulation using the methods described herein, these cells may be in a preferred state for enhanced engraftment and in vivo expansion. Thus, in certain embodiments, cells are collected from blood, bone marrow, lymph node, thymus, or another tissue or bodily fluid, or an apheresis product, during this recovery phase. Further, in certain aspects, mobilization and conditioning regimens can be used to create a condition in a subject wherein repopulation, recirculation, regeneration, and/or expansion of particular cell types is favored, especially during a defined window of time following therapy.

[0369] The number of cells that are employed will depend upon a number of circumstances including, the lifetime of the cells, the protocol to be used (e.g., the number of administrations), the ability of the cells to multiply, the stability of the recombinant construct, and the like. In certain embodiments, the cells are applied as a dispersion, generally being injected at or near the site of interest. The cells may be administered in any physiologically acceptable medium.

[0370] In certain embodiments, the cancer is cancer of the lung, bile duct cancer (e.g., cholangiocarcinoma), pancreatic cancer, colorectal cancer, ovarian, or gynecologic cancer. In certain embodiments, the cancer is leukemia (e.g., mixed lineage leukemia, acute lymphocytic leukemia, acute myeloid leukemia, chronic lymphocytic leukemia, or chronic myeloid leukemia), alveolar rhabdomyosarcoma, bone cancer, brain cancer (e.g., glioma, e.g., glioblastoma), breast cancer, cancer of the anus, anal canal, or anorectum, cancer of the eye, cancer of the intrahepatic bile duct (e.g., intrahepatic cholangiocellular cancer), cancer of the joints, cancer of the neck, gallbladder, or pleura, cancer of the nose, nasal cavity, or middle ear, cancer of the oral cavity, cancer of the vulva, myeloma (e.g., chronic myeloid cancer), colon cancer, esophageal cancer, cervical cancer, gastrointestinal cancer, gastrointestinal carcinoid tumor, Hodgkin's lymphoma, hypopharynx cancer, kidney cancer, larynx cancer, liver cancer (e.g., hepatocellular carcinoma), lung cancer (e.g., non-small cell lung cancer), malignant mesothelioma, melanoma, multiple myeloma, nasopharynx cancer, non-Hodgkin's lymphoma, ovarian cancer, pancreatic cancer, peritoneum, omentum, and mesentery cancer, pharynx cancer, prostate cancer, rectal cancer, renal cancer (e.g., renal cell carcinoma (RCC)), gastric cancer, small intestine cancer, soft tissue cancer, stomach cancer, carcinoma, sarcoma (e.g., synovial sarcoma, rhabdomyosarcoma), skin cancer, testicular cancer, thyroid cancer, head and neck cancer, ureter cancer, and urinary bladder cancer. In certain embodiments, the cancer is melanoma, breast cancer, lung cancer, prostate cancer, thyroid cancer, ovarian cancer, or synovial sarcoma. In one embodiment, the cancer is synovial sarcoma or liposarcoma (e.g., myxoid/round cell liposarcoma). In certain embodiments, the cancer is lung, cholangiocarcinoma, pancreatic, colorectal, gynecological or ovarian cancer.

[0371] A polycistronic polynucleotide, recombinant vector, engineered cell, or pharmaceutical composition described herein may be delivered to a subject by a variety of routes. These include, but are not limited to, parenteral, intranasal, intratracheal, oral, intradermal, topical, intramuscular, intraperitoneal, transdermal, intravenous, intratumoral, conjunctival, intrathecal, and subcutaneous routes. Pulmonary administration can also be employed, e.g., by use of an inhaler or nebulizer, and formulation with an aerosolizing agent for use as a spray. In certain embodiments, the polycistronic polynucleotide, recombinant vector, engineered cell, or pharmaceutical composition described herein is delivered intravenously. In certain embodiments, the polycistronic polynucleotide, vector, engineered cell, or pharmaceutical composition described herein is delivered subcutaneously. In certain embodiments, the polycistronic polynucleotide, recombinant vector, engineered cell, or pharmaceutical composition described herein is delivered intratumorally. In certain embodiments, the polycistronic polynucleotide, recombinant vector, engineered cell, or pharmaceutical composition described herein is delivered into a tumor draining lymph node.

[0372] The amount of the polycistronic polynucleotide, recombinant vector, engineered cell, or pharmaceutical composition which will be effective in the treatment and/or prevention of a condition will depend on the nature of the disease, and can be determined by standard clinical techniques.

[0373] The precise dose to be employed in a composition will also depend on various factors, including but not limited to the route of administration, and the seriousness of the infection or disease caused by it, and should be decided according to the judgment of the practitioner and each subject's circumstances. For example, effective doses may also vary depending upon means of administration, target site, physiological state of the patient (including age, body weight, and health), whether the patient is a human or an animal, other medications administered, or whether treatment is prophylactic or therapeutic. Usually, the patient is a human but non-human mammals including transgenic mammals can also be treated. Treatment dosages are optimally titrated to optimize safety and efficacy.

c. Immune Effector Cells and Methods of Engineering

[0374] In one aspect, provided herein are cells, e.g., immune effector cells, comprising a recombinant vector comprising a polycistronic expression cassette (e.g., a vector described herein). In some embodiments, the immune effector cell is a T cell. For example, in certain embodiments, the T cell is selected from the group consisting of a naïve T cell (CD4+ or CD8+); a killer CD8+ T cell; a CD4+ T cell corresponding to Th1, Th2, Th9, Th17, Th22, follicular helper (Tfh), regulatory (Treg) lineages; CD8⁺ cytotoxic T cell; a CD4⁺ cytotoxic T cell; a CD4⁺ helper T cell (e.g., a Th1 or a Th2 cell); a CD4/CD8 double positive T cell; a tumor infiltrating T cell (TIL); a thymocyte; a memory T cell, (e.g., a central memory T cell, effector memory T cell, a stem cell memory T cell or a stem cell memory-like T cell); and a natural killer T cell, e.g., an invariant natural killer T cell. In some embodiments, the T cell is a CD39^{neg}CD69^{neg} T cell or a CD8⁺CD39^{neg}CD69^{neg} cell, as described, e.g., in Krishna et al., “Stem-like CD8 T cells mediate response of adoptive cell immunotherapy against human cancer,” 2020 370(6522):1328-1334, which is incorporated by reference herein in its entirety. Precursor cells of the cellular immune system (e.g., precursors of T lymphocytes) are also useful for presenting a TCR disclosed herein because these cells may differentiate, develop, or mature into effector cells. Accordingly, in certain embodiments, the mammalian cell is a pluripotent stem cell (e.g., an embryonic stem cell, an induced pluripotent stem cell), a hematopoietic stem cell, or a lymphocyte progenitor cell. In certain embodiments, the hematopoietic stem cell or lymphocyte progenitor cell is isolated and/or enriched from, e.g., bone marrow, umbilical cord blood, or peripheral blood. In some embodiments, the immune effector cell is a CD4+ T cell. In some embodiments, the immune effector cell is a CD8+ T cell. In one aspect, provided herein is a population of immune effector cells comprising a polycistronic vector described herein. In some embodiments, the population of immune effector cells comprises CD4+ T cells and CD8+ T cells. In some embodiments, the population of immune effector cells are an ex vivo culture.

[0375] In another aspect, the present disclosure provides a population of engineered T cells, wherein most of the engineered T cells in the population comprise an exogenous TCR or functional fragment thereof, and wherein more than 2%, 3%, 4%, 5%, 6%, 7%, 8%, 9%, 10%, 15%, 20%, 25%, 30%, 35% or 40% of the population of engineered T cells are CCR7+/CD45RO+. In another aspect, the present disclosure provides a population of engineered T cells, wherein most of the engineered T cells in the population comprise an exogenous TCR or functional fragment thereof, and wherein more than 2%, 3%, 4%, 5%, 6%, 7%, 8%, 9%, 10%, 15%, 20%, 25%, 30%, 35% or 40% of the population of engineered T cells are memory T cells (e.g., a central memory T cell, an effector memory T cell, a stem cell-like memory T cells). In some embodiments, the T cells are electroporated with a vector that expresses the exogenous TCR or functional fragment thereof. In some embodiments, the T cells are cultured and/or expanded according to any of the methods provided herein.

[0376] In another aspect, the present disclosure provides a population of engineered T cells, wherein most of the engineered T cells in the population comprise an exogenous TCR or functional fragment thereof, and wherein more than 2%, 3%, 4%, 5%, 6%, 7%, 8%. 9%, 10%, 15%, 20%, 25%, 30%, 35% or 40% of the population of engineered T cells are CD95+/CD62L+. In another aspect, the present disclosure provides a population of engineered T cells, wherein most of the engineered T cells in the population comprise an exogenous TCR or functional fragment thereof, and wherein more than 2%, 3%, 4%, 5%, 6%, 7%, 8%, 9%, 10%, 15%, 20%, 25%, 30%, 35% or 40% of the population of engineered T cells are memory T cells (e.g., a central memory T cell, an effector memory T cell, a stem cell memory T cells). In some embodiments, the T cells are electroporated with a vector that expresses the exogenous TCR or functional fragment thereof. In some embodiments, the T cells are cultured and/or expanded according to any of the methods provided herein. In one aspect, provided herein are methods of introducing a vector described herein into a plurality of cells, e.g., immune effector cells, to produce a plurality of engineered cells, e.g., immune effector cells. Methods of introducing vectors into a cell are well known in the art. In the context of an expression vector, the vector can be readily introduced into a host cell, e.g., mammalian (e.g., human) cell by any method in the art. For example, the expression vector can be transferred into a host cell by transfection or transduction. Exemplary methods for introducing a vector into a host cell, include, but are not limited to, electroporation (also referred to herein as electro-transfer), sonication, calcium phosphate precipitation, lipofection, particle bombardment, microinjection, mechanical deformation by passage through a microfluidic device, and the like, see, e.g., Sambrook et al. Molecular Cloning: A Laboratory Manual, Cold Spring Harbor Laboratory, New York (2001), the entire contents of which is incorporated by reference herein. In some embodiments, a polycistronic vector is introduced into an immune effector cell or population of immune effector cells via electroporation. Alternative delivery systems include, e.g., colloidal dispersion systems, such as macromolecule complexes, nanocapsules, microspheres, beads, and lipid-based systems including oil-in-water emulsions, micelles, mixed micelles, and liposomes. In some embodiments, the polycistronic vector is introduced into a population of cells, e.g., immune effector cells, ex vivo, in vitro, or in vivo. In some embodiments, the polycistronic vector is introduced into a population of cells, e.g., immune effector cells, ex vivo.

i. Sources of Immune Effector Cells

[0377] Immune effector cells may be obtained from a subject by any suitable method known in the art. For example, T cells (e.g., CD4+ T cells and CD8+ T cells) can be obtained from several sources, including peripheral blood mononuclear cells, bone marrow, lymph node tissue, cord blood, thymus tissue, tissue from a site of infection, ascites, pleural effusion, spleen tissue, and tumors. In some embodiments, immune effector cells (e.g., T cells) are obtained from blood collected from a subject using any number of techniques known to the skilled artisan. In some embodiments, cells from the circulating blood of an individual are obtained by apheresis. The apheresis product typically contains lymphocytes, including T cells, monocytes, granulocytes, B cells, other nucleated white blood cells, red blood cells, and platelets. T cells are isolated from peripheral blood lymphocytes by lysing the red blood cells and depleting the monocytes, for example, by centrifugation through a Percoll gradient or by counter flow centrifugal elutriation.

[0378] The cells collected by apheresis can be washed to remove the plasma fraction and to place the cells in an appropriate buffer (e.g., phosphate buffered saline (PBS)) or media for subsequent processing steps. The washing step may be accomplished by methods known to those in the art, such as by using a semi-automated “flow-through” centrifuge. After washing, the cells may be resuspended in a variety of biocompatible buffers, such as, for example, Ca-free, Mg-free PBS, PlasmaLyte A, or other saline solution with or without buffer. Alternatively, the undesirable components of the apheresis sample may be removed and the cells directly resuspended in culture media.

[0379] A specific subpopulation of cells can be further isolated by positive or negative selection techniques (e.g., antibody coated beads, flow cytometry, etc.). In some embodiments, a specific subpopulation of T cells, such as CD3+, CD28+, CD4+, CD8+, CD45RA+, and CD45RO+ T cells, can be further isolated by positive or negative selection techniques (e.g., antibody coated beads, flow cytometry, etc.).

[0380] In certain embodiments, the mammalian cell is a population of cells presenting a TCR disclosed herein on the cell surface. The population of cells can be heterogeneous or homogenous. In certain embodiments, at least 50% (e.g., at least 60%, 70%, 80%, 90%, 95%, 99%, 99.5%, or 99.9%) of the population is a cell as described herein. In certain embodiments, the population is substantially pure, wherein at least 50% (e.g., at least 60%, 70%, 80%, 90%, 95%, 99%, 99.5%, or 99.9%) of the population is homogeneous. In certain embodiments, the population is heterogeneous and comprises a mixed population of cells (e.g., the cells have different cell types, developmental stages, origins, are isolated, purified, or enriched by different methods, are stimulated with different agents, and/or are engineered by different methods). In certain embodiments, the cells are a population of peripheral blood mononuclear cells (PBMC) (e.g., human PBMCs).

[0381] Populations of cells can be enriched or purified, as needed. In certain embodiments, regulatory T cells (e.g., CD25⁺ T cells) are depleted from the population, e.g., by using an anti-CD25 antibody conjugated to a surface such as a bead, particle, or cell. In certain embodiments, an anti-CD25 antibody is conjugated to a fluorescent dye (e.g., for use in fluorescence-activated cell sorting). In certain embodiments, cells expressing checkpoint receptors (e.g., CTLA-4, PD-1, TIM-3, LAG-3, TIGIT, VISTA, BTLA, TIGIT, CD137, or CEACAM1) are depleted from the population, e.g., by using an antibody that binds specifically to a checkpoint receptor conjugated to a surface such as a bead, particle, or cell. In certain embodiments, a T cell population can be selected so that it expresses one or more of IFN-γ, TNFα, IL-17A, IL-2, IL-3, IL-4, GM-CSF, IL-13, granzyme (e.g., granzyme B), and perforin, or other appropriate molecules, e.g., other cytokines. Methods for determining such expression are described, for example, in PCT Publication No.: WO 2013/126712, which is incorporated by reference herein in its entirety.

d. Pharmaceutical Compositions

[0382] Provided herein are pharmaceutical compositions comprising a population of engineered immune effector cells disclosed herein having the desired degree of purity in a physiologically acceptable carrier, excipient or stabilizer (see, e.g., Remington's Pharmaceutical Sciences (1990) Mack Publishing Co., Easton, PA). Acceptable carriers, excipients, or stabilizers are nontoxic to recipients at the dosages and concentrations employed, and include buffers such as phosphate, citrate, and other organic acids; antioxidants including ascorbic acid and methionine; preservatives (such as octadecyldimethylbenzyl ammonium chloride; hexamethonium chloride; benzalkonium chloride, benzethonium chloride; phenol, butyl or benzyl alcohol; alkyl parabens such as methyl or propyl paraben; catechol; resorcinol; cyclohexanol; 3-pentanol; and m-cresol); low molecular weight (less than about 10 residues) polypeptides; proteins, such as serum albumin, gelatin, or immunoglobulins; hydrophilic polymers such as polyvinylpyrrolidone; amino acids such as glycine, glutamine, asparagine, histidine, arginine, or lysine; monosaccharides, disaccharides, and other carbohydrates including glucose, mannose, or dextrins; chelating agents such as EDTA; sugars such as sucrose, mannitol, trehalose or sorbitol; salt-forming counter-ions such as sodium; metal complexes (e.g., Zn-protein complexes); and/or non-ionic surfactants such as TWEEN™, PLURONICS™ or polyethylene glycol (PEG).

[0383] Pharmaceutical compositions described herein can be useful in inducing an immune response in a subject and treating a condition, such as cancer. In one embodiment, the present disclosure provides a pharmaceutical composition comprising a population of engineered immune effector cells described herein for use as a medicament. In another embodiment, the disclosure provides a pharmaceutical composition for use in a method for the treatment of cancer. In some embodiments, pharmaceutical compositions comprise a population of engineered immune effector cells disclosed herein, and optionally one or more additional prophylactic or therapeutic agents, in a pharmaceutically acceptable carrier.

[0384] A pharmaceutical composition may be formulated for any route of administration to a subject. Specific examples of routes of administration include parenteral administration (e.g., intravenous, subcutaneous, intramuscular). In some embodiments, the pharmaceutical composition is formulated for intravenous administration. Injectables can be prepared in conventional forms, either as liquid solutions or suspensions. The injectables can contain one or more excipients. Exemplary excipients include, for example, water, saline, dextrose, glycerol or ethanol. In addition, if desired, the pharmaceutical compositions to be administered can also contain minor amounts of non-toxic auxiliary substances such as wetting or emulsifying agents, pH buffering agents, stabilizers, solubility enhancers, and other such agents, such as for example, sodium acetate, sorbitan monolaurate, triethanolamine oleate and cyclodextrins.

[0385] In some embodiments, the pharmaceutical composition is formulated for intravenous administration. Suitable carriers for intravenous administration include physiological saline or phosphate buffered saline (PBS), and solutions containing thickening and solubilizing agents, such as glucose, polyethylene glycol, and polypropylene glycol and mixtures thereof.

[0386] The compositions to be used for in vivo administration can be sterile. This is readily accomplished by filtration through, e.g., sterile filtration membranes.

[0387] Pharmaceutically acceptable carriers used in parenteral preparations include for example, aqueous vehicles, nonaqueous vehicles, antimicrobial agents, isotonic agents, buffers, antioxidants, local anesthetics, suspending and dispersing agents, emulsifying agents, sequestering or chelating agents and other pharmaceutically acceptable substances. Examples of aqueous vehicles include sodium chloride injection, Ringer's injection, isotonic dextrose injection, sterile water injection, dextrose and lactated Ringer's injection. Nonaqueous parenteral vehicles include fixed oils of vegetable origin, cottonseed oil, corn oil, sesame oil and peanut oil. Antimicrobial agents in bacteriostatic or fungistatic concentrations can be added to parenteral preparations packaged in multiple-dose containers which include phenols or cresols, mercurials, benzyl alcohol, chlorobutanol, methyl and propyl p-hydroxybenzoic acid esters, thimerosal, benzalkonium chloride and benzethonium chloride. Isotonic agents include sodium chloride and dextrose. Buffers include phosphate and citrate. Antioxidants include sodium bisulfate. Local anesthetics include procaine hydrochloride. Suspending and dispersing agents include sodium carboxymethylcellulose, hydroxypropyl methylcellulose and polyvinylpyrrolidone. Emulsifying agents include Polysorbate 80 (TWEEN® 80). A sequestering or chelating agent of metal ions includes EDTA. Pharmaceutical carriers also include ethyl alcohol, polyethylene glycol and propylene glycol for water miscible vehicles; and sodium hydroxide, hydrochloric acid, citric acid or lactic acid for pH adjustment.

[0388] The precise dose to be employed in a pharmaceutical composition will also depend on the route of administration, and the seriousness of the condition caused by it, and should be decided according to the judgment of the practitioner and each subject's circumstances. For example, effective doses may also vary depending upon means of administration, target site, physiological state of the subject (including age, body weight, and health), other medications administered, or whether treatment is prophylactic or therapeutic. Treatment dosages are optimally titrated to optimize safety and efficacy.

### 1.8 Kits

[0389] In one aspect, provided herein are kits comprising one or more pharmaceutical composition, population of engineered effector cells (e.g., recombinant cells), polynucleotide, or vector described herein and instructions for use. Such kits may include, e.g., a carrier, package, or container that is compartmentalized to receive one or more containers such as vials, tubes, and the like. Suitable containers include, for example, bottles, vials, syringes, and test tubes. In one embodiment, the containers are formed from a variety of materials such as glass or plastic.

[0390] In a specific embodiment, provided herein is a pharmaceutical kit comprising one or more containers filled with one or more of the ingredients of the pharmaceutical compositions described herein, population of engineered immune effector cells, polynucleotides, or vectors provided herein. In one embodiment, the kit comprises a pharmaceutical composition comprising a population of engineered immune effector cells described herein. In one embodiment, the kit comprises a pharmaceutical composition comprising a population of immune effector cells engineered according to a method described herein. In some embodiments, the kit contains a pharmaceutical composition described herein and a prophylactic or therapeutic agent. Optionally associated with such container(s) can be a notice in the form prescribed by a governmental agency regulating the manufacture, use or sale of pharmaceuticals or biological products, which notice reflects approval by the agency of manufacture, use or sale for human administration.

### 1.9 Non-Limiting Examples of Embodiments

[0391] Embodiment 1. A method of expanding a population of electroporated T cells comprising culturing the electroporated T cells with a first culture medium comprising an exogenous glutathione precursor and IL-15, wherein the electroporated T cells are contacted with the first culture medium within 12 hours of electroporation.

[0392] Embodiment 2. The method of embodiment 1, wherein the glutathione precursor is N-acetylcysteine (NAC).

[0393] Embodiment 3. The method of embodiment 1 or 2, wherein the first culture medium comprises IL-7.

[0394] Embodiment 4. The method of any one of embodiments 1 to 3, wherein the first culture medium comprises IL-21.

[0395] Embodiment 5. The method of any one of embodiments 1 to 4, wherein the first culture medium comprises IL-7 and IL-21.

[0396] Embodiment 6. The method of any one of embodiments 1 to 5, wherein the electroporated T cells are electroporated prior to culturing with the first culture medium.

[0397] Embodiment 7. The method of embodiment 6, wherein the electroporated T cells are cultured in the first culture medium for 6-12 hours after electroporation.

[0398] Embodiment 8. The method of any one of embodiments 1 to 7 further comprising culturing the T cells with a second culture medium, wherein the second culture medium comprises one or more cytokines selected from the group consisting of IL-7, IL-12, and IL-21.

[0399] Embodiment 9. The method of embodiment 8, wherein the second culture medium comprises IL-7, IL-12, and IL-21.

[0400] Embodiment 10. The method of embodiment 8 or 9, wherein IL-21 is added to the second culture medium every 2 to 3 days.

[0401] Embodiment 11. The method of any one of embodiments 8 to 10, wherein at least one of the cytokines selected from the group consisting of IL-7 and IL-12 are added to the second culture medium only on the first day of culturing.

[0402] Embodiment 12. The method of embodiment 11, wherein IL-7 and IL-12 are added to the second culture medium only on the first day of culturing.

[0403] Embodiment 13. The method of any one of embodiments 8 to 12, wherein the T cells are cultured in the second culture medium after being cultured in the first culture medium.

[0404] Embodiment 14. The method of any one of embodiments 8 to 13, wherein the T cells are cultured in the second culture medium for 11 to 13 days.

[0405] Embodiment 15. The method of any one of embodiments 1 to 14, further comprising culturing the T cells with a third culture medium, wherein the third culture medium comprises one or more cytokines selected from the group consisting of IL-2 and IL-21.

[0406] Embodiment 16. The method of embodiment 15, wherein the third culture medium comprises IL-2.

[0407] Embodiment 17. The method of embodiment 15 or 16, wherein the third culture medium comprises IL-21.

[0408] Embodiment 18. The method of any one of embodiments 15 to 17, wherein the third culture medium further comprises IL-12.

[0409] Embodiment 19. The method of any one of embodiments 15 to 18, wherein the third culture medium further comprises an exogenous glutathione precursor.

[0410] Embodiment 20. The method of embodiment 19, wherein the exogenous glutathione precursor in NAC.

[0411] Embodiment 21. The method of any one of embodiments 15 to 20, wherein the third culture medium comprises IL-12, IL-21 and NAC.

[0412] Embodiment 22. The method of any one of embodiments 15 to 21, wherein the third culture medium comprises IL-2, IL-12, IL-21 and NAC.

[0413] Embodiment 23. The method of any one of embodiments 17 to 22, wherein IL-21 is added to the third culture medium every 2 to 3 days.

[0414] Embodiment 24. The method of any one of embodiments 16 or 18 to 22, wherein IL-2 is added to the third culture medium every 3 to 4 days.

[0415] Embodiment 25. The method of any one of embodiments 16 or 18 to 23, wherein IL-2 is present in the third culture medium in an amount from 30 U/ml to 3000 U/ml.

[0416] Embodiment 26. The method of any one of embodiments 18 to 25, wherein the IL-12 is added to the third culture medium only on the first day of culturing.

[0417] Embodiment 27. The method of any one of embodiments 15 to 26, wherein the T cells are cultured in the third culture medium after being cultured in the second culture medium.

[0418] Embodiment 28. The method of any one of embodiments 15 to 27, wherein the T cells are cultured in the third culture medium for 11 to 13 days.

[0419] Embodiment 29. The method of any one of embodiments 1 to 28, wherein the first, second and/or third culture media further comprise a TCR agonist.

[0420] Embodiment 30. The method of embodiment 29, wherein the TCR agonist is a CD3 agonist.

[0421] Embodiment 31. The method of any one of embodiments 1 to 30, wherein the first, second and/or third culture media further comprise an agonist of a T cell costimulatory molecule.

[0422] Embodiment 32. The method of embodiment 31, wherein the agonist of a T cell costimulatory molecule is a CD28 agonist.

[0423] Embodiment 33. The method of any one of embodiments 1 to 32, wherein the first, second and/or third culture media further comprise a nanomatrix.

[0424] Embodiment 34. The method of embodiment 33, wherein the TCR agonist and/or the T cell costimulatory molecule is associated with the nanomatrix.

[0425] Embodiment 35. The method of any one of embodiments 1 to 34, further comprising culturing the cells with feeder cells.

[0426] Embodiment 36. A population of engineered T cells manufactured according to the method of any one of embodiments 1 to 35.

[0427] Embodiment 37. The population of engineered T cells of embodiment 36, wherein more than 10% of the engineered T cells in the population comprise one or more of the following: an exogenous TCR or functional fragment thereof, and an exogenous membrane-bound IL-15.

[0428] Embodiment 38. The population of engineered T cells of embodiment 36, wherein more than 2% of the engineered T cells in the population co-express an exogenous TCR or functional fragment thereof and an exogenous membrane-bound IL-15.

[0429] Embodiment 39. A population of engineered T cells, wherein more than 10% of the engineered T cells in the population comprise an exogenous TCR or functional fragment thereof, and wherein more than 20% of the population of engineered T cells are CCR7+/CD45RO+.

[0430] Embodiment 40. A population of engineered T cells, wherein more than 10% of the engineered T cells in the population comprise an exogenous TCR or functional fragment thereof, and wherein more than 40% of the population of engineered T cells are CD95+/CD62L+.

[0431] Embodiment 41. The population of engineered T cells of embodiment 40, wherein the population of engineered T cells comprise more than 5%, 10%, 15%, 20%, 25%, 30%, 35%, 40%, 45% or 50% CD45RA+CD45RO-CD62L+CD95+ cells.

[0432] Embodiment 42. The population of engineered T cells of embodiment 40, wherein the population of engineered T cells comprise more than 5%, 10%, 15%, 20%, 25%, 30%, 35%, 40%, 45% or 50% CD45RA+CD45RO+CD62L+CD95+ cells.

[0433] Embodiment 43. A population of cells comprising a polycistronic expression cassette comprising:
[0434] a. a first cistron comprising a polynucleotide sequence that encodes a fusion protein that comprises IL-15, or a functional fragment or functional variant thereof, and IL-15Rα, or a functional fragment or functional variant thereof,
[0435] b. a second cistron comprising a polynucleotide sequence that encodes a TCR beta chain comprising a Vβ region and a Cβ region; and
[0436] c. a third cistron comprising a polynucleotide sequence that encodes a TCR alpha chain comprising a Vα region and a Cα region, wherein the population of cells are T cells that comprise more than 5%, 10%, 15%, 20%, 25%, 30%, 35%, 40%, 45% or 50% CD45RA+CD45RO-CD62L+CD95+ cells.

[0437] Embodiment 44. A population of cells comprising a polycistronic expression cassette comprising:
[0438] d. a first cistron comprising a polynucleotide sequence that encodes a fusion protein that comprises IL-15, or a functional fragment or functional variant thereof, and IL-15Rα, or a functional fragment or functional variant thereof,
[0439] e. a second cistron comprising a polynucleotide sequence that encodes a TCR beta chain comprising a Vβ region and a Cβ region; and
[0440] f. a third cistron comprising a polynucleotide sequence that encodes a TCR alpha chain comprising a Vα region and a Cα region, wherein the population of cells are T cells that comprise more than 5%, 10%, 15%, 20%, 25%, 30%, 35%, 40%, 45% or 50% CD45RA+CD45RO+CD62L+CD95+ cells.

[0441] Embodiment 45. A method of expanding a population of electroporated T cells comprising culturing the electroporated T cells with a first culture medium comprising one or more cytokines.

[0442] Embodiment 46. The method of embodiment 45, wherein the electroporated T cells are contacted with the first culture medium within 12 hours of electroporation.

[0443] Embodiment 47. The method of embodiment 45 or 46, wherein the one or more cytokines are selected from the group consisting of IL-7, IL-15, and IL-21.

[0444] Embodiment 48. The method of any one of embodiments 45 to 47, wherein the first culture medium further comprises an exogenous glutathione precursor.

[0445] Embodiment 49. The method of embodiment 48, wherein the glutathione precursor is N-acetylcysteine (NAC).

[0446] Embodiment 50. The method of any one of embodiments 45 to 49, wherein the first culture medium comprises IL-15.

[0447] Embodiment 51. The method of any one of embodiments 45 to 50, wherein the first culture medium comprises IL-7.

[0448] Embodiment 52. The method of any one of embodiments 45 to 51, wherein the first culture medium comprises IL-21.

[0449] Embodiment 53. The method of any one of embodiments 45 to 52, wherein the first culture medium comprises IL-7 and IL-21.

[0450] Embodiment 54. The method of any one of embodiments 45 to 53, wherein the electroporated T cells were electroporated prior to culturing with the first culture medium.

[0451] Embodiment 55. The method of embodiment 54, wherein the electroporated T cells are cultured in the first culture medium for 6-12 hours after electroporation.

[0452] Embodiment 56. The method of any one of embodiments 45 to 55 further comprising culturing the T cells with a second culture medium, wherein the second culture medium comprises one or more cytokines selected from the group consisting of IL-7, IL-12, and IL-21.

[0453] Embodiment 57. The method of embodiment 56, wherein the second culture medium comprises IL-7, IL-12, and IL-21.

[0454] Embodiment 58. The method of embodiment 56 or 57, wherein IL-21 is added to the second culture medium every 2 to 3 days.

[0455] Embodiment 59. The method of any one of embodiments 56 to 58, wherein at least one of the cytokines selected from the group consisting of IL-7 and IL-12 are added to the second culture medium only on the first day of culturing.

[0456] Embodiment 60. The method of embodiment 59, wherein IL-7 and IL-12 are added to the second culture medium only on the first day of culturing.

[0457] Embodiment 61. The method of any one of embodiments 56 to 60, wherein the T cells are cultured in the second culture medium after being cultured in the first culture medium.

[0458] Embodiment 62. The method of any one of embodiments 56 to 61, wherein the T cells are cultured in the second culture medium for 11 to 13 days.

[0459] Embodiment 63. The method of any one of embodiments 45 to 62, further comprising culturing the T cells with a third culture medium, wherein the third culture medium comprises one or more cytokines selected from the group consisting of IL-2 and IL-21.

[0460] Embodiment 64. The method of embodiment 63, wherein the third culture medium comprises IL-2.

[0461] Embodiment 65. The method of embodiment 63 or 64, wherein the third culture medium comprises IL-21.

[0462] Embodiment 66. The method of any one of embodiments 63 to 65, wherein the third culture medium further comprises IL-12.

[0463] Embodiment 67. The method of any one of embodiments 63 to 66, wherein the third culture medium further comprises an exogenous glutathione precursor.

[0464] Embodiment 68. The method of embodiment 67, wherein the exogenous glutathione precursor is NAC.

[0465] Embodiment 69. The method of any one of embodiments 63 to 68, wherein the third culture medium comprises IL-12, IL-21 and NAC.

[0466] Embodiment 70. The method of any one of embodiments 63 to 69, wherein the third culture medium comprises IL-2, IL-12, IL-21 and NAC.

[0467] Embodiment 71. The method of any one of embodiments 65 to 70, wherein IL-21 is added to the third culture medium every 2 to 3 days.

[0468] Embodiment 72. The method of any one of embodiments 64 or 66 to 70, wherein IL-2 is added to the third culture medium every 3 to 4 days.

[0469] Embodiment 73. The method of any one of embodiments 64 or 66 to 71, wherein IL-2 is present in the third culture medium in an amount from 30 U/ml to 3000 U/ml.

[0470] Embodiment 74. The method of any one of embodiments 66 to 73, wherein the IL-12 is added to the third culture medium only on the first day of culturing.

[0471] Embodiment 75. The method of any one of embodiments 63 to 74, wherein the T cells are cultured in the third culture medium after being cultured in the second culture medium.

[0472] Embodiment 76. The method of any one of embodiments 63 to 75, wherein the T cells are cultured in the third culture medium for 11 to 13 days.

[0473] Embodiment 77. The method of any one of embodiments 45 to 76, wherein the first, second and/or third culture media further comprise a TCR agonist.

[0474] Embodiment 78. The method of embodiment 77, wherein the TCR agonist is a CD3 agonist.

[0475] Embodiment 79. The method of any one of embodiments 45 to 78, wherein the first, second and/or third culture media further comprise an agonist of a T cell costimulatory molecule.

[0476] Embodiment 80. The method of embodiment 79, wherein the agonist of a T cell costimulatory molecule is a CD28 agonist.

[0477] Embodiment 81. The method of any one of embodiments 45 to 80, wherein the first, second and/or third culture media further comprise a nanomatrix.

[0478] Embodiment 82. The method of embodiment 81, wherein the TCR agonist and/or the T cell costimulatory molecule is associated with the nanomatrix.

[0479] Embodiment 83. The method of any one of embodiments 45 to 82, further comprising culturing the cells with feeder cells.

[0480] Embodiment 84. A population of engineered T cells manufactured according to the method of any one of embodiments 45 to 83.

[0481] Embodiment 85. The population of engineered T cells of embodiment 84, wherein more than 10% of the engineered T cells in the population comprise one or more of the following: an exogenous TCR or functional fragment thereof, and an exogenous membrane-bound IL-15.

[0482] Embodiment 86. The population of engineered T cells of embodiment 84, wherein more than 2% of the engineered T cells in the population co-express an exogenous TCR or functional fragment thereof and an exogenous membrane-bound IL-15.

[0483] Embodiment 87. A population of engineered T cells, wherein more than 10% of the engineered T cells in the population comprise an exogenous TCR or functional fragment thereof, and wherein more than 20% of the population of engineered T cells are CCR7+/CD45RO+.

[0484] Embodiment 88. A population of engineered T cells, wherein more than 10% of the engineered T cells in the population comprise an exogenous TCR or functional fragment thereof, and wherein more than 40% of the population of engineered T cells are CD95+/CD62L+.

[0485] Embodiment 89. The population of engineered T cells of embodiment 88, wherein the population of engineered T cells comprise more than 5%, 10%, 15%, 20%, 25%, 30%, 35%, 40%, 45% or 50% CD45RA+CD45RO-CD62L+CD95+ cells.

[0486] Embodiment 90. The population of engineered T cells of embodiment 88, wherein the population of engineered T cells comprise more than 5%, 10%, 15%, 20%, 25%, 30%, 35%, 40%, 45% or 50% CD45RA+CD45RO+CD62L+CD95+ cells.

[0487] Embodiment 91. A population of cells comprising a polycistronic expression cassette comprising:
[0488] g. a first cistron comprising a polynucleotide sequence that encodes a fusion protein that comprises IL-15, or a functional fragment or functional variant thereof, and IL-15Rα, or a functional fragment or functional variant thereof,
[0489] h. a second cistron comprising a polynucleotide sequence that encodes a TCR beta chain comprising a Vβ region and a Cβ region; and
[0490] i. a third cistron comprising a polynucleotide sequence that encodes a TCR alpha chain comprising a Vα region and a Cα region.

[0491] Embodiment 92. The population of cells of embodiment 91, wherein the population of cells are T cells that comprise more than 5%, 10%, 15%, 20%, 25%, 30%, 35%, 40%, 45% or 50% CD45RA+CD45RO-CD62L+CD95+ cells.

[0492] Embodiment 93. The population of cells of embodiment 91, wherein the population of cells are T cells that comprise more than 5%, 10%, 15%, 20%, 25%, 30%, 35%, 40%, 45% or 50% CD45RA+CD45RO+CD62L+CD95+ cells.

### EXAMPLES

[0493] The examples of the present disclosure are offered by way of illustration and explanation, and are not intended to limit the scope of the present disclosure.

### Example 1: Construction of Transposon Plasmids

[0494] To improve homogeneity of multigene co-expression and product manufacturability, recombinant nucleic acid SB transposon plasmids comprising polycistronic expression cassettes were constructed. The polycistronic expression cassettes each include a transcriptional regulatory element operably linked to a polycistronic polynucleotide that encodes the TCR α chain of TCR001 (referred to herein as “TCRα” or “A”), the TCR β chain of TCR001 (referred to herein as “TCRβ” or “B”), and membrane-bound IL-15/IL-15Rα fusion protein (referred to herein as “mbIL15” or “15”), each separated by a furin recognition site and either a P2A element or a T2A element that mediates ribosome skipping to enable expression of separate polypeptide chains.

[0495] The TCR used in this Example, TCR001, is a chimeric TCR with murine-derived constant regions and with human Vα and Vβ regions specific for the R175H mutation of the p53 protein (in which position 175 of the p53 protein is mutated from Arg to His) in the context of HLA-A*02:01.

[0496] Briefly, TCRα was generated by fusing a human Vα region, including its N-terminal signal sequence (SEQ ID NO: 1006) with a glutamic acid at position 2, to a murine Cα region modified by substituting a cysteine at amino acid position 48, a leucine at amino acid position 112, an isoleucine at amino acid position 114, and a valine at amino acid position 115 (SEQ ID NO: 41). TCRβ was generated by fusing a human Vβ region, including its N-terminal signal sequence (SEQ ID NO: 2006) with an alanine at position 2, to a murine Cβ modified by substituting a cysteine at amino acid position 57 (SEQ ID NO: 51). mbIL15 was constructed by joining human IL-15 (SEQ ID NO: 76) to human IL-15Rα (SEQ ID NO: 78) via a Gly-Ser-rich linker peptide (SEQ ID NO: 81), with an IgE signal sequence (SEQ ID NO: 83) N-terminal to the human IL-15. Schematics of each of these three polypeptide constructs are shown in FIG. 1, from N terminus (left) to C terminus (right) for each construct.

[0497] To explore the effect of gene/element order on expression and function, eight tricistronic polynucleotide expression cassettes were generated with polynucleotides encoding each of TCRα, TCRβ, and mbIL15. In each expression cassette, these three elements were fused pairwise with a) a polynucleotide encoding a furin recognition site joined to a P2A element (SEQ ID NO: 11) (referred to herein as “fP2A” or “P”) and b) a polynucleotide encoding a furin recognition site joined to a T2A element (SEQ ID NO: 13) (referred to herein as “fT2A” or “T”). The resulting tricistronic expression cassettes, including suitable transcriptional regulatory elements, were inserted between the ITRs of Sleeping Beauty (SB) transposon plasmids. The 5′ to 3′ order of elements in the open reading frame (ORF) of each expression cassette and SB Plasmid is shown in Table E1, and schematics of the ORFs of these eight expression cassettes are shown in FIG. 2A.

TABLE E1
Tricistronic SB transposon plasmids.

| Plasmid Name | Cassette Name | Order of Elements (5′ to 3′) |
|---|---|---|
| Plasmid APBT15 | Cassette APBT15 | TCRα-fP2A-TCRβ-fT2A-mbIL15 |
| Plasmid ATBP15 | Cassette ATBP15 | TCRα-fT2A-TCRβ-fP2A-mbIL15 |
| Plasmid AP15TB | Cassette AP15TB | TCRα-fP2A- mbIL15-fT2A-TCRβ |
| Plasmid AT15PB | Cassette AT15PB | TCRα-fT2A- mbIL15-fP2A-TCRβ |
| Plasmid BPAT15 | Cassette BPAT15 | TCRβ-fP2A-TCRα-fT2A-mbIL15 |
| Plasmid BTAP15 | Cassette BTAP15 | TCRβ-fT2A-TCRα-fP2A-mbIL15 |
| Plasmid BP15TA | Cassette BP15TA | TCRβ-fP2A- mbIL15-fT2A-TCRα |
| Plasmid BT15PA | Cassette BT15PA | TCRβ-fT2A- mbIL15-fP2A-TCRα |

The polynucleotide sequences of the ORFs of these transposon plasmids is shown in Table E2.

TABLE E2
Polynucleotide sequences of SB plasmid ORFs.

| | | SEQ |
|---|---|---|
| | | ID |
| Plasmid | Polynucleotide Sequence of ORF | NO: |
| Plasmid | ATGGAGTCCTTTCTGGGCGGCGTGCTGCTGATCCTGTGGCTGCAGGTGGACTGGGTGAAAT | 320 |
| APBT15 | CCCAGAAGATCGAGCAGAACTCTGAGGCGCTGAATATTCAGGAGGGCAAGACCGCGACACT | |
| | GACCTGCAACTACACAAATTATTCCCCAGCGTACCTGCAGTGGTATAGGCAGGACCCAGGC | |
| | AGGGGACCCGTGTTTCTGCTGCTGATTCGGGAGAATGAGAAGGAGAAAAGAAAGGAGAGGC | |
| | TGAAAGTGACCTTCGATACCACACTGAAGCAGTCTCTGTTTCACATCACAGCGTCTCAGCC | |
| | AGCGGACAGCGCGACCTACCTGTGCGCGCTGGACATCTACCCTCACGATATGAGATTCGGC | |
| | GCGGGCACAAGGCTGACCGTGAAACCAAACATCCAGAATCCCGAGCCTGCGGTGTACCAGC | |
| | TGAAGGACCCCCGCTCTCAGGATAGCACACTGTGCCTGTTCACCGACTTTGATAGCCAGAT | |
| | CAACGTGCCTAAAACAATGGAGTCCGGCACCTTCATCACCGACAAGTGCGTGCTGGATATG | |
| | AAAGCGATGGACTCCAAGTCTAACGGCGCGATCGCGTGGTCCAATCAGACATCTTTCACCT | |
| | GCCAGGATATCTTCAAGGAGACAAACGCGACCTATCCTTCCTCTGACGTGCCATGTGATGC | |
| | GACACTGACCGAGAAGAGCTTCGAGACAGACATGAACCTGAATTTTCAGAATCTGCTGGTC | |
| | ATCGTGCTGAGAATCCTGCTGCTGAAGGTGGCGGGCTTTAATCTGCTGATGACACTGCGGC | |
| | TGTGGAGTTCCCGGGCGAAACGCTCTGGAAGCGGAGCGACCAATTTCAGCCTGCTGAAGCA | |
| | GGCGGGCGATGTGGAGGAGAACCCTGGCCCAATGGCGACAAGACTGCTGTGCTGGGCGGCG | |
| | CTGTGCCTGCTGGGAGCGGAACTGACTGAAGCGGGGGTCGCGCAGAGCCCTCGATACAAAA | |
| | TCATTGAGAAGCGGCAGTCTGTGGCGTTCTGGTGCAACCCAATCAGCGGACACGCGACCCT | |
| | GTACTGGTATCAGCAGATCCTGGGCCAGGGCCCTAAGCTGCTGATTCAGTTCCAGAACAAT | |
| | GGCGTGGTGGACGATAGCCAGCTGCCAAAAGATAGATTTTCCGCGGAGAGGCTGAAGGGCG | |
| | TGGACTCTACACTGAAAATTCAGCCTGCGAAGCTGGAGGATAGCGCGGTGTACCTGTGCGC | |
| | GAGCTCCCTGGACCCAGGCGATACCGGAGAGCTGTTCTTTGGAGAGGGCAGCCGGCTGACA | |
| | GTGCTGGAGGACCTGAGGAACGTGACCCCACCTAAAGTGAGCCTGTTCGAGCCATCCAAGG | |
| | CGGAGATCGCGAATAAGCAGAAAGCGACCCTGGTGTGCCTGGCGAGGGGCTTCTTTCCCGA | |
| | TCACGTGGAGCTGTCCTGGTGGGTGAACGGCAAAGAGGTGCACTCTGGCGTGTGCACAGAC | |
| | CCTCAGGCGTACAAGGAGAGCAATTACTCCTATTGTCTGTCTAGCAGACTGAGGGTGAGCG | |
| | CGACCTTTTGGCACAACCCCCGGAATCACTTCCGCTGCCAGGTGCAGTTTCACGGCCTGTC | |
| | CGAGGAGGATAAATGGCCTGAGGGCTCTCCAAAGCCCGTGACACAGAATATCAGCGCGGAG | |
| | GCGTGGGGAAGAGCGGACTGTGGCATTACAAGCGCGTCCTATCAGCAGGGCGTGCTGTCCG | |
| | CGACCATCCTGTACGAGATTCTGCTGGGCAAGGCGACACTGTATGCGGTGCTGGTGTCCAC | |
| | CCTGGTGGTCATGGCGATGGTGAAGAGGAAAAACTCTCGGGCGAAACGCTCTGGAAGCGGA | |
| | GAGGGCAGAGGAAGTCTTCTAACATGCGGTGACGTGGAGGAGAATCCCGGCCCTATGGATT | |
| | GGACCTGGATTCTGTTTCTGGTGGCCGCTGCCACAAGAGTGCACAGCAACTGGGTGAATGT | |
| | GATCAGCGACCTGAAGAAGATCGAGGATCTGATCCAGAGCATGCACATTGATGCCACCCTG | |
| | TACACAGAATCTGATGTGCACCCTAGCTGTAAAGTGACCGCCATGAAGTGTTTTCTGCTGG | |
| | AGCTGCAGGTGATTTCTCTGGAAAGCGGAGATGCCTCTATCCACGACACAGTGGAGAATCT | |
| | GATCATCCTGGCCAACAATAGCCTGAGCAGCAATGGCAATGTGACAGAGTCTGGCTGTAAG | |
| | GAGTGTGAGGAGCTGGAGGAGAAGAACATCAAGGAGTTTCTGCAGAGCTTTGTGCACATCG | |
| | TGCAGATGTTCATCAATACAAGCTCTGGCGGAGGATCTGGAGGAGGCGGATCTGGAGGAGG | |
| | AGGCAGTGGAGGCGGAGGATCTGGCGGAGGATCTCTGCAGATTACATGCCCTCCTCCAATG | |
| | TCTGTGGAGCACGCCGATATTTGGGTGAAGTCCTACAGCCTGTACAGCAGAGAGAGATACA | |
| | TCTGCAACAGCGGCTTTAAGAGAAAGGCCGGCACCTCTTCTCTGACAGAGTGCGTGCTGAA | |
| | TAAGGCCACAAATGTGGCCCACTGGACAACACCTAGCCTGAAGTGCATTAGAGATCCTGCC | |
| | CTGGTCCACCAGAGGCCTGCCCCTCCATCTACAGTGACAACAGCCGGAGTGACACCTCAGC | |
| | CTGAATCTCTGAGCCCTTCTGGAAAAGAACCTGCCGCCAGCTCTCCTAGCTCTAATAATAC | |
| | CGCCGCCACAACAGCCGCCATTGTGCCTGGATCTCAGCTGATGCCTAGCAAGTCTCCTAGC | |
| | ACAGGCACAACAGAGATCAGCAGCCACGAATCTTCTCACGGAACACCTTCTCAGACCACCG | |
| | CCAAGAATTGGGAGCTGACAGCCTCTGCCTCTCACCAGCCTCCAGGAGTGTATCCTCAGGG | |
| | CCACTCTGATACAACAGTGGCCATCAGCACATCTACAGTGCTGCTGTGTGGACTGTCTGCC | |
| | GTGTCTCTGCTGGCCTGTTACCTGAAGTCTAGACAGACACCTCCTCTGGCCTCTGTGGAGA | |
| | TGGAGGCCATGGAAGCCCTGCCTGTGACATGGGGAACAAGCAGCAGAGATGAAGACCTGGA | |
| | GAATTGTTCTCACCACCTG | |
| Plasmid | ATGGAGTCCTTTCTGGGCGGCGTGCTGCTGATCCTGTGGCTGCAGGTGGACTGGGTGAAAT | 321 |
| ATBP15 | CCCAGAAGATCGAGCAGAACTCTGAGGCGCTGAATATTCAGGAGGGCAAGACCGCGACACT | |
| | GACCTGCAACTACACAAATTATTCCCCAGCGTACCTGCAGTGGTATAGGCAGGACCCAGGC | |
| | AGGGGACCCGTGTTTCTGCTGCTGATTCGGGAGAATGAGAAGGAGAAAAGAAAGGAGAGGC | |
| | TGAAAGTGACCTTCGATACCACACTGAAGCAGTCTCTGTTTCACATCACAGCGTCTCAGCC | |
| | AGCGGACAGCGCGACCTACCTGTGCGCGCTGGACATCTACCCTCACGATATGAGATTCGGC | |
| | GCGGGCACAAGGCTGACCGTGAAACCAAACATCCAGAATCCCGAGCCTGCGGTGTACCAGC | |
| | TGAAGGACCCCCGCTCTCAGGATAGCACACTGTGCCTGTTCACCGACTTTGATAGCCAGAT | |
| | CAACGTGCCTAAAACAATGGAGTCCGGCACCTTCATCACCGACAAGTGCGTGCTGGATATG | |
| | AAAGCGATGGACTCCAAGTCTAACGGCGCGATCGCGTGGTCCAATCAGACATCTTTCACCT | |
| | GCCAGGATATCTTCAAGGAGACAAACGCGACCTATCCTTCCTCTGACGTGCCATGTGATGC | |
| | GACACTGACCGAGAAGAGCTTCGAGACAGACATGAACCTGAATTTTCAGAATCTGCTGGTC | |
| | ATCGTGCTGAGAATCCTGCTGCTGAAGGTGGCGGGCTTTAATCTGCTGATGACACTGCGGC | |
| | TGTGGAGTTCCCGGGCGAAACGCTCTGGAAGCGGAGAGGGCAGAGGAAGTCTTCTAACATG | |
| | CGGTGACGTGGAGGAGAATCCCGGCCCTATGGCGACAAGACTGCTGTGCTGGGCGGCGCTG | |
| | TGCCTGCTGGGAGCGGAACTGACTGAAGCGGGGGTCGCGCAGAGCCCTCGATACAAAATCA | |
| | TTGAGAAGCGGCAGTCTGTGGCGTTCTGGTGCAACCCAATCAGCGGACACGCGACCCTGTA | |
| | CTGGTATCAGCAGATCCTGGGCCAGGGCCCTAAGCTGCTGATTCAGTTCCAGAACAATGGC | |
| | GTGGTGGACGATAGCCAGCTGCCAAAAGATAGATTTTCCGCGGAGAGGCTGAAGGGCGTGG | |
| | ACTCTACACTGAAAATTCAGCCTGCGAAGCTGGAGGATAGCGCGGTGTACCTGTGCGCGAG | |
| | CTCCCTGGACCCAGGCGATACCGGAGAGCTGTTCTTTGGAGAGGGCAGCCGGCTGACAGTG | |
| | CTGGAGGACCTGAGGAACGTGACCCCACCTAAAGTGAGCCTGTTCGAGCCATCCAAGGCGG | |
| | AGATCGCGAATAAGCAGAAAGCGACCCTGGTGTGCCTGGCGAGGGGCTTCTTTCCCGATCA | |
| | CGTGGAGCTGTCCTGGTGGGTGAACGGCAAAGAGGTGCACTCTGGCGTGTGCACAGACCCT | |
| | CAGGCGTACAAGGAGAGCAATTACTCCTATTGTCTGTCTAGCAGACTGAGGGTGAGCGCGA | |
| | CCTTTTGGCACAACCCCCGGAATCACTTCCGCTGCCAGGTGCAGTTTCACGGCCTGTCCGA | |
| | GGAGGATAAATGGCCTGAGGGCTCTCCAAAGCCCGTGACACAGAATATCAGCGCGGAGGCG | |
| | TGGGGAAGAGCGGACTGTGGCATTACAAGCGCGTCCTATCAGCAGGGCGTGCTGTCCGCGA | |
| | CCATCCTGTACGAGATTCTGCTGGGCAAGGCGACACTGTATGCGGTGCTGGTGTCCACCCT | |
| | GGTGGTCATGGCGATGGTGAAGAGGAAAAACTCTCGGGCGAAACGCTCTGGAAGCGGAGCG | |
| | ACCAATTTCAGCCTGCTGAAGCAGGCGGGCGATGTGGAGGAGAACCCTGGCCCAATGGATT | |
| | GGACCTGGATTCTGTTTCTGGTGGCCGCTGCCACAAGAGTGCACAGCAACTGGGTGAATGT | |
| | GATCAGCGACCTGAAGAAGATCGAGGATCTGATCCAGAGCATGCACATTGATGCCACCCTG | |
| | TACACAGAATCTGATGTGCACCCTAGCTGTAAAGTGACCGCCATGAAGTGTTTTCTGCTGG | |
| | AGCTGCAGGTGATTTCTCTGGAAAGCGGAGATGCCTCTATCCACGACACAGTGGAGAATCT | |
| | GATCATCCTGGCCAACAATAGCCTGAGCAGCAATGGCAATGTGACAGAGTCTGGCTGTAAG | |
| | GAGTGTGAGGAGCTGGAGGAGAAGAACATCAAGGAGTTTCTGCAGAGCTTTGTGCACATCG | |
| | TGCAGATGTTCATCAATACAAGCTCTGGCGGAGGATCTGGAGGAGGCGGATCTGGAGGAGG | |
| | AGGCAGTGGAGGCGGAGGATCTGGCGGAGGATCTCTGCAGATTACATGCCCTCCTCCAATG | |
| | TCTGTGGAGCACGCCGATATTTGGGTGAAGTCCTACAGCCTGTACAGCAGAGAGAGATACA | |
| | TCTGCAACAGCGGCTTTAAGAGAAAGGCCGGCACCTCTTCTCTGACAGAGTGCGTGCTGAA | |
| | TAAGGCCACAAATGTGGCCCACTGGACAACACCTAGCCTGAAGTGCATTAGAGATCCTGCC | |
| | CTGGTCCACCAGAGGCCTGCCCCTCCATCTACAGTGACAACAGCCGGAGTGACACCTCAGC | |
| | CTGAATCTCTGAGCCCTTCTGGAAAAGAACCTGCCGCCAGCTCTCCTAGCTCTAATAATAC | |
| | CGCCGCCACAACAGCCGCCATTGTGCCTGGATCTCAGCTGATGCCTAGCAAGTCTCCTAGC | |
| | ACAGGCACAACAGAGATCAGCAGCCACGAATCTTCTCACGGAACACCTTCTCAGACCACCG | |
| | CCAAGAATTGGGAGCTGACAGCCTCTGCCTCTCACCAGCCTCCAGGAGTGTATCCTCAGGG | |
| | CCACTCTGATACAACAGTGGCCATCAGCACATCTACAGTGCTGCTGTGTGGACTGTCTGCC | |
| | GTGTCTCTGCTGGCCTGTTACCTGAAGTCTAGACAGACACCTCCTCTGGCCTCTGTGGAGA | |
| | TGGAGGCCATGGAAGCCCTGCCTGTGACATGGGGAACAAGCAGCAGAGATGAAGACCTGGA | |
| | GAATTGTTCTCACCACCTG | |
| Plasmid | ATGGAGTCCTTTCTGGGCGGCGTGCTGCTGATCCTGTGGCTGCAGGTGGACTGGGTGAAAT | 322 |
| AP15TB | CCCAGAAGATCGAGCAGAACTCTGAGGCGCTGAATATTCAGGAGGGCAAGACCGCGACACT | |
| | GACCTGCAACTACACAAATTATTCCCCAGCGTACCTGCAGTGGTATAGGCAGGACCCAGGC | |
| | AGGGGACCCGTGTTTCTGCTGCTGATTCGGGAGAATGAGAAGGAGAAAAGAAAGGAGAGGC | |
| | TGAAAGTGACCTTCGATACCACACTGAAGCAGTCTCTGTTTCACATCACAGCGTCTCAGCC | |
| | AGCGGACAGCGCGACCTACCTGTGCGCGCTGGACATCTACCCTCACGATATGAGATTCGGC | |
| | GCGGGCACAAGGCTGACCGTGAAACCAAACATCCAGAATCCCGAGCCTGCGGTGTACCAGC | |
| | TGAAGGACCCCCGCTCTCAGGATAGCACACTGTGCCTGTTCACCGACTTTGATAGCCAGAT | |
| | CAACGTGCCTAAAACAATGGAGTCCGGCACCTTCATCACCGACAAGTGCGTGCTGGATATG | |
| | AAAGCGATGGACTCCAAGTCTAACGGCGCGATCGCGTGGTCCAATCAGACATCTTTCACCT | |
| | GCCAGGATATCTTCAAGGAGACAAACGCGACCTATCCTTCCTCTGACGTGCCATGTGATGC | |
| | GACACTGACCGAGAAGAGCTTCGAGACAGACATGAACCTGAATTTTCAGAATCTGCTGGTC | |
| | ATCGTGCTGAGAATCCTGCTGCTGAAGGTGGCGGGCTTTAATCTGCTGATGACACTGCGGC | |
| | TGTGGAGTTCCCGGGCGAAACGCTCTGGAAGCGGAGCGACCAATTTCAGCCTGCTGAAGCA | |
| | GGCGGGCGATGTGGAGGAGAACCCTGGCCCAATGGATTGGACCTGGATTCTGTTTCTGGTG | |
| | GCCGCTGCCACAAGAGTGCACAGCAACTGGGTGAATGTGATCAGCGACCTGAAGAAGATCG | |
| | AGGATCTGATCCAGAGCATGCACATTGATGCCACCCTGTACACAGAATCTGATGTGCACCC | |
| | TAGCTGTAAAGTGACCGCCATGAAGTGTTTTCTGCTGGAGCTGCAGGTGATTTCTCTGGAA | |
| | AGCGGAGATGCCTCTATCCACGACACAGTGGAGAATCTGATCATCCTGGCCAACAATAGCC | |
| | TGAGCAGCAATGGCAATGTGACAGAGTCTGGCTGTAAGGAGTGTGAGGAGCTGGAGGAGAA | |
| | GAACATCAAGGAGTTTCTGCAGAGCTTTGTGCACATCGTGCAGATGTTCATCAATACAAGC | |
| | TCTGGCGGAGGATCTGGAGGAGGCGGATCTGGAGGAGGAGGCAGTGGAGGCGGAGGATCTG | |
| | GCGGAGGATCTCTGCAGATTACATGCCCTCCTCCAATGTCTGTGGAGCACGCCGATATTTG | |
| | GGTGAAGTCCTACAGCCTGTACAGCAGAGAGAGATACATCTGCAACAGCGGCTTTAAGAGA | |
| | AAGGCCGGCACCTCTTCTCTGACAGAGTGCGTGCTGAATAAGGCCACAAATGTGGCCCACT | |
| | GGACAACACCTAGCCTGAAGTGCATTAGAGATCCTGCCCTGGTCCACCAGAGGCCTGCCCC | |
| | TCCATCTACAGTGACAACAGCCGGAGTGACACCTCAGCCTGAATCTCTGAGCCCTTCTGGA | |
| | AAAGAACCTGCCGCCAGCTCTCCTAGCTCTAATAATACCGCCGCCACAACAGCCGCCATTG | |
| | TGCCTGGATCTCAGCTGATGCCTAGCAAGTCTCCTAGCACAGGCACAACAGAGATCAGCAG | |
| | CCACGAATCTTCTCACGGAACACCTTCTCAGACCACCGCCAAGAATTGGGAGCTGACAGCC | |
| | TCTGCCTCTCACCAGCCTCCAGGAGTGTATCCTCAGGGCCACTCTGATACAACAGTGGCCA | |
| | TCAGCACATCTACAGTGCTGCTGTGTGGACTGTCTGCCGTGTCTCTGCTGGCCTGTTACCT | |
| | GAAGTCTAGACAGACACCTCCTCTGGCCTCTGTGGAGATGGAGGCCATGGAAGCCCTGCCT | |
| | GTGACATGGGGAACAAGCAGCAGAGATGAAGACCTGGAGAATTGTTCTCACCACCTGCGGG | |
| | CGAAACGCTCTGGAAGCGGAGAGGGCAGAGGAAGTCTTCTAACATGCGGTGACGTGGAGGA | |
| | GAATCCCGGCCCTATGGCGACAAGACTGCTGTGCTGGGCGGCGCTGTGCCTGCTGGGAGCG | |
| | GAACTGACTGAAGCGGGGGTCGCGCAGAGCCCTCGATACAAAATCATTGAGAAGCGGCAGT | |
| | CTGTGGCGTTCTGGTGCAACCCAATCAGCGGACACGCGACCCTGTACTGGTATCAGCAGAT | |
| | CCTGGGCCAGGGCCCTAAGCTGCTGATTCAGTTCCAGAACAATGGCGTGGTGGACGATAGC | |
| | CAGCTGCCAAAAGATAGATTTTCCGCGGAGAGGCTGAAGGGCGTGGACTCTACACTGAAAA | |
| | TTCAGCCTGCGAAGCTGGAGGATAGCGCGGTGTACCTGTGCGCGAGCTCCCTGGACCCAGG | |
| | CGATACCGGAGAGCTGTTCTTTGGAGAGGGCAGCCGGCTGACAGTGCTGGAGGACCTGAGG | |
| | AACGTGACCCCACCTAAAGTGAGCCTGTTCGAGCCATCCAAGGCGGAGATCGCGAATAAGC | |
| | AGAAAGCGACCCTGGTGTGCCTGGCGAGGGGCTTCTTTCCCGATCACGTGGAGCTGTCCTG | |
| | GTGGGTGAACGGCAAAGAGGTGCACTCTGGCGTGTGCACAGACCCTCAGGCGTACAAGGAG | |
| | AGCAATTACTCCTATTGTCTGTCTAGCAGACTGAGGGTGAGCGCGACCTTTTGGCACAACC | |
| | CCCGGAATCACTTCCGCTGCCAGGTGCAGTTTCACGGCCTGTCCGAGGAGGATAAATGGCC | |
| | TGAGGGCTCTCCAAAGCCCGTGACACAGAATATCAGCGCGGAGGCGTGGGGAAGAGCGGAC | |
| | TGTGGCATTACAAGCGCGTCCTATCAGCAGGGCGTGCTGTCCGCGACCATCCTGTACGAGA | |
| | TTCTGCTGGGCAAGGCGACACTGTATGCGGTGCTGGTGTCCACCCTGGTGGTCATGGCGAT | |
| | GGTGAAGAGGAAAAACTCT | |
| Plasmid | ATGGAGTCCTTTCTGGGCGGCGTGCTGCTGATCCTGTGGCTGCAGGTGGACTGGGTGAAAT | 323 |
| AT15PB | CCCAGAAGATCGAGCAGAACTCTGAGGCGCTGAATATTCAGGAGGGCAAGACCGCGACACT | |
| | GACCTGCAACTACACAAATTATTCCCCAGCGTACCTGCAGTGGTATAGGCAGGACCCAGGC | |
| | AGGGGACCCGTGTTTCTGCTGCTGATTCGGGAGAATGAGAAGGAGAAAAGAAAGGAGAGGC | |
| | TGAAAGTGACCTTCGATACCACACTGAAGCAGTCTCTGTTTCACATCACAGCGTCTCAGCC | |
| | AGCGGACAGCGCGACCTACCTGTGCGCGCTGGACATCTACCCTCACGATATGAGATTCGGC | |
| | GCGGGCACAAGGCTGACCGTGAAACCAAACATCCAGAATCCCGAGCCTGCGGTGTACCAGC | |
| | TGAAGGACCCCCGCTCTCAGGATAGCACACTGTGCCTGTTCACCGACTTTGATAGCCAGAT | |
| | CAACGTGCCTAAAACAATGGAGTCCGGCACCTTCATCACCGACAAGTGCGTGCTGGATATG | |
| | AAAGCGATGGACTCCAAGTCTAACGGCGCGATCGCGTGGTCCAATCAGACATCTTTCACCT | |
| | GCCAGGATATCTTCAAGGAGACAAACGCGACCTATCCTTCCTCTGACGTGCCATGTGATGC | |
| | GACACTGACCGAGAAGAGCTTCGAGACAGACATGAACCTGAATTTTCAGAATCTGCTGGTC | |
| | ATCGTGCTGAGAATCCTGCTGCTGAAGGTGGCGGGCTTTAATCTGCTGATGACACTGCGGC | |
| | TGTGGAGTTCCCGGGCGAAACGCTCTGGAAGCGGAGAGGGCAGAGGAAGTCTTCTAACATG | |
| | CGGTGACGTGGAGGAGAATCCCGGCCCTATGGATTGGACCTGGATTCTGTTTCTGGTGGCC | |
| | GCTGCCACAAGAGTGCACAGCAACTGGGTGAATGTGATCAGCGACCTGAAGAAGATCGAGG | |
| | ATCTGATCCAGAGCATGCACATTGATGCCACCCTGTACACAGAATCTGATGTGCACCCTAG | |
| | CTGTAAAGTGACCGCCATGAAGTGTTTTCTGCTGGAGCTGCAGGTGATTTCTCTGGAAAGC | |
| | GGAGATGCCTCTATCCACGACACAGTGGAGAATCTGATCATCCTGGCCAACAATAGCCTGA | |
| | GCAGCAATGGCAATGTGACAGAGTCTGGCTGTAAGGAGTGTGAGGAGCTGGAGGAGAAGAA | |
| | CATCAAGGAGTTTCTGCAGAGCTTTGTGCACATCGTGCAGATGTTCATCAATACAAGCTCT | |
| | GGCGGAGGATCTGGAGGAGGCGGATCTGGAGGAGGAGGCAGTGGAGGCGGAGGATCTGGCG | |
| | GAGGATCTCTGCAGATTACATGCCCTCCTCCAATGTCTGTGGAGCACGCCGATATTTGGGT | |
| | GAAGTCCTACAGCCTGTACAGCAGAGAGAGATACATCTGCAACAGCGGCTTTAAGAGAAAG | |
| | GCCGGCACCTCTTCTCTGACAGAGTGCGTGCTGAATAAGGCCACAAATGTGGCCCACTGGA | |
| | CAACACCTAGCCTGAAGTGCATTAGAGATCCTGCCCTGGTCCACCAGAGGCCTGCCCCTCC | |
| | ATCTACAGTGACAACAGCCGGAGTGACACCTCAGCCTGAATCTCTGAGCCCTTCTGGAAAA | |
| | GAACCTGCCGCCAGCTCTCCTAGCTCTAATAATACCGCCGCCACAACAGCCGCCATTGTGC | |
| | CTGGATCTCAGCTGATGCCTAGCAAGTCTCCTAGCACAGGCACAACAGAGATCAGCAGCCA | |
| | CGAATCTTCTCACGGAACACCTTCTCAGACCACCGCCAAGAATTGGGAGCTGACAGCCTCT | |
| | GCCTCTCACCAGCCTCCAGGAGTGTATCCTCAGGGCCACTCTGATACAACAGTGGCCATCA | |
| | GCACATCTACAGTGCTGCTGTGTGGACTGTCTGCCGTGTCTCTGCTGGCCTGTTACCTGAA | |
| | GTCTAGACAGACACCTCCTCTGGCCTCTGTGGAGATGGAGGCCATGGAAGCCCTGCCTGTG | |
| | ACATGGGGAACAAGCAGCAGAGATGAAGACCTGGAGAATTGTTCTCACCACCTGCGGGCGA | |
| | AACGCTCTGGAAGCGGAGCGACCAATTTCAGCCTGCTGAAGCAGGCGGGCGATGTGGAGGA | |
| | GAACCCTGGCCCAATGGCGACAAGACTGCTGTGCTGGGCGGCGCTGTGCCTGCTGGGAGCG | |
| | GAACTGACTGAAGCGGGGGTCGCGCAGAGCCCTCGATACAAAATCATTGAGAAGCGGCAGT | |
| | CTGTGGCGTTCTGGTGCAACCCAATCAGCGGACACGCGACCCTGTACTGGTATCAGCAGAT | |
| | CCTGGGCCAGGGCCCTAAGCTGCTGATTCAGTTCCAGAACAATGGCGTGGTGGACGATAGC | |
| | CAGCTGCCAAAAGATAGATTTTCCGCGGAGAGGCTGAAGGGCGTGGACTCTACACTGAAAA | |
| | TTCAGCCTGCGAAGCTGGAGGATAGCGCGGTGTACCTGTGCGCGAGCTCCCTGGACCCAGG | |
| | CGATACCGGAGAGCTGTTCTTTGGAGAGGGCAGCCGGCTGACAGTGCTGGAGGACCTGAGG | |
| | AACGTGACCCCACCTAAAGTGAGCCTGTTCGAGCCATCCAAGGCGGAGATCGCGAATAAGC | |
| | AGAAAGCGACCCTGGTGTGCCTGGCGAGGGGCTTCTTTCCCGATCACGTGGAGCTGTCCTG | |
| | GTGGGTGAACGGCAAAGAGGTGCACTCTGGCGTGTGCACAGACCCTCAGGCGTACAAGGAG | |
| | AGCAATTACTCCTATTGTCTGTCTAGCAGACTGAGGGTGAGCGCGACCTTTTGGCACAACC | |
| | CCCGGAATCACTTCCGCTGCCAGGTGCAGTTTCACGGCCTGTCCGAGGAGGATAAATGGCC | |
| | TGAGGGCTCTCCAAAGCCCGTGACACAGAATATCAGCGCGGAGGCGTGGGGAAGAGCGGAC | |
| | TGTGGCATTACAAGCGCGTCCTATCAGCAGGGCGTGCTGTCCGCGACCATCCTGTACGAGA | |
| | TTCTGCTGGGCAAGGCGACACTGTATGCGGTGCTGGTGTCCACCCTGGTGGTCATGGCGAT | |
| | GGTGAAGAGGAAAAACTCT | |
| Plasmid | ATGGCGACAAGACTGCTGTGCTGGGCGGCGCTGTGCCTGCTGGGAGCGGAACTGACTGAAG | 324 |
| BPAT15 | CGGGGGTCGCGCAGAGCCCTCGATACAAAATCATTGAGAAGCGGCAGTCTGTGGCGTTCTG | |
| | GTGCAACCCAATCAGCGGACACGCGACCCTGTACTGGTATCAGCAGATCCTGGGCCAGGGC | |
| | CCTAAGCTGCTGATTCAGTTCCAGAACAATGGCGTGGTGGACGATAGCCAGCTGCCAAAAG | |
| | ATAGATTTTCCGCGGAGAGGCTGAAGGGCGTGGACTCTACACTGAAAATTCAGCCTGCGAA | |
| | GCTGGAGGATAGCGCGGTGTACCTGTGCGCGAGCTCCCTGGACCCAGGCGATACCGGAGAG | |
| | CTGTTCTTTGGAGAGGGCAGCCGGCTGACAGTGCTGGAGGACCTGAGGAACGTGACCCCAC | |
| | CTAAAGTGAGCCTGTTCGAGCCATCCAAGGCGGAGATCGCGAATAAGCAGAAAGCGACCCT | |
| | GGTGTGCCTGGCGAGGGGCTTCTTTCCCGATCACGTGGAGCTGTCCTGGTGGGTGAACGGC | |
| | AAAGAGGTGCACTCTGGCGTGTGCACAGACCCTCAGGCGTACAAGGAGAGCAATTACTCCT | |
| | ATTGTCTGTCTAGCAGACTGAGGGTGAGCGCGACCTTTTGGCACAACCCCCGGAATCACTT | |
| | CCGCTGCCAGGTGCAGTTTCACGGCCTGTCCGAGGAGGATAAATGGCCTGAGGGCTCTCCA | |
| | AAGCCCGTGACACAGAATATCAGCGCGGAGGCGTGGGGAAGAGCGGACTGTGGCATTACAA | |
| | GCGCGTCCTATCAGCAGGGCGTGCTGTCCGCGACCATCCTGTACGAGATTCTGCTGGGCAA | |
| | GGCGACACTGTATGCGGTGCTGGTGTCCACCCTGGTGGTCATGGCGATGGTGAAGAGGAAA | |
| | AACTCTCGGGCGAAACGCTCTGGAAGCGGAGCGACCAATTTCAGCCTGCTGAAGCAGGCGG | |
| | GCGATGTGGAGGAGAACCCTGGCCCAATGGAGTCCTTTCTGGGCGGCGTGCTGCTGATCCT | |
| | GTGGCTGCAGGTGGACTGGGTGAAATCCCAGAAGATCGAGCAGAACTCTGAGGCGCTGAAT | |
| | ATTCAGGAGGGCAAGACCGCGACACTGACCTGCAACTACACAAATTATTCCCCAGCGTACC | |
| | TGCAGTGGTATAGGCAGGACCCAGGCAGGGGACCCGTGTTTCTGCTGCTGATTCGGGAGAA | |
| | TGAGAAGGAGAAAAGAAAGGAGAGGCTGAAAGTGACCTTCGATACCACACTGAAGCAGTCT | |
| | CTGTTTCACATCACAGCGTCTCAGCCAGCGGACAGCGCGACCTACCTGTGCGCGCTGGACA | |
| | TCTACCCTCACGATATGAGATTCGGCGCGGGCACAAGGCTGACCGTGAAACCAAACATCCA | |
| | GAATCCCGAGCCTGCGGTGTACCAGCTGAAGGACCCCCGCTCTCAGGATAGCACACTGTGC | |
| | CTGTTCACCGACTTTGATAGCCAGATCAACGTGCCTAAAACAATGGAGTCCGGCACCTTCA | |
| | TCACCGACAAGTGCGTGCTGGATATGAAAGCGATGGACTCCAAGTCTAACGGCGCGATCGC | |
| | GTGGTCCAATCAGACATCTTTCACCTGCCAGGATATCTTCAAGGAGACAAACGCGACCTAT | |
| | CCTTCCTCTGACGTGCCATGTGATGCGACACTGACCGAGAAGAGCTTCGAGACAGACATGA | |
| | ACCTGAATTTTCAGAATCTGCTGGTCATCGTGCTGAGAATCCTGCTGCTGAAGGTGGCGGG | |
| | CTTTAATCTGCTGATGACACTGCGGCTGTGGAGTTCCCGGGCGAAACGCTCTGGAAGCGGA | |
| | GAGGGCAGAGGAAGTCTTCTAACATGCGGTGACGTGGAGGAGAATCCCGGCCCTATGGATT | |
| | GGACCTGGATTCTGTTTCTGGTGGCCGCTGCCACAAGAGTGCACAGCAACTGGGTGAATGT | |
| | GATCAGCGACCTGAAGAAGATCGAGGATCTGATCCAGAGCATGCACATTGATGCCACCCTG | |
| | TACACAGAATCTGATGTGCACCCTAGCTGTAAAGTGACCGCCATGAAGTGTTTTCTGCTGG | |
| | AGCTGCAGGTGATTTCTCTGGAAAGCGGAGATGCCTCTATCCACGACACAGTGGAGAATCT | |
| | GATCATCCTGGCCAACAATAGCCTGAGCAGCAATGGCAATGTGACAGAGTCTGGCTGTAAG | |
| | GAGTGTGAGGAGCTGGAGGAGAAGAACATCAAGGAGTTTCTGCAGAGCTTTGTGCACATCG | |
| | TGCAGATGTTCATCAATACAAGCTCTGGCGGAGGATCTGGAGGAGGCGGATCTGGAGGAGG | |
| | AGGCAGTGGAGGCGGAGGATCTGGCGGAGGATCTCTGCAGATTACATGCCCTCCTCCAATG | |
| | TCTGTGGAGCACGCCGATATTTGGGTGAAGTCCTACAGCCTGTACAGCAGAGAGAGATACA | |
| | TCTGCAACAGCGGCTTTAAGAGAAAGGCCGGCACCTCTTCTCTGACAGAGTGCGTGCTGAA | |
| | TAAGGCCACAAATGTGGCCCACTGGACAACACCTAGCCTGAAGTGCATTAGAGATCCTGCC | |
| | CTGGTCCACCAGAGGCCTGCCCCTCCATCTACAGTGACAACAGCCGGAGTGACACCTCAGC | |
| | CTGAATCTCTGAGCCCTTCTGGAAAAGAACCTGCCGCCAGCTCTCCTAGCTCTAATAATAC | |
| | CGCCGCCACAACAGCCGCCATTGTGCCTGGATCTCAGCTGATGCCTAGCAAGTCTCCTAGC | |
| | ACAGGCACAACAGAGATCAGCAGCCACGAATCTTCTCACGGAACACCTTCTCAGACCACCG | |
| | CCAAGAATTGGGAGCTGACAGCCTCTGCCTCTCACCAGCCTCCAGGAGTGTATCCTCAGGG | |
| | CCACTCTGATACAACAGTGGCCATCAGCACATCTACAGTGCTGCTGTGTGGACTGTCTGCC | |
| | GTGTCTCTGCTGGCCTGTTACCTGAAGTCTAGACAGACACCTCCTCTGGCCTCTGTGGAGA | |
| | TGGAGGCCATGGAAGCCCTGCCTGTGACATGGGGAACAAGCAGCAGAGATGAAGACCTGGA | |
| | GAATTGTTCTCACCACCTG | |
| Plasmid | ATGGCGACAAGACTGCTGTGCTGGGCGGCGCTGTGCCTGCTGGGAGCGGAACTGACTGAAG | 325 |
| BTAP15 | CGGGGGTCGCGCAGAGCCCTCGATACAAAATCATTGAGAAGCGGCAGTCTGTGGCGTTCTG | |
| | GTGCAACCCAATCAGCGGACACGCGACCCTGTACTGGTATCAGCAGATCCTGGGCCAGGGC | |
| | CCTAAGCTGCTGATTCAGTTCCAGAACAATGGCGTGGTGGACGATAGCCAGCTGCCAAAAG | |
| | ATAGATTTTCCGCGGAGAGGCTGAAGGGCGTGGACTCTACACTGAAAATTCAGCCTGCGAA | |
| | GCTGGAGGATAGCGCGGTGTACCTGTGCGCGAGCTCCCTGGACCCAGGCGATACCGGAGAG | |
| | CTGTTCTTTGGAGAGGGCAGCCGGCTGACAGTGCTGGAGGACCTGAGGAACGTGACCCCAC | |
| | CTAAAGTGAGCCTGTTCGAGCCATCCAAGGCGGAGATCGCGAATAAGCAGAAAGCGACCCT | |
| | GGTGTGCCTGGCGAGGGGCTTCTTTCCCGATCACGTGGAGCTGTCCTGGTGGGTGAACGGC | |
| | AAAGAGGTGCACTCTGGCGTGTGCACAGACCCTCAGGCGTACAAGGAGAGCAATTACTCCT | |
| | ATTGTCTGTCTAGCAGACTGAGGGTGAGCGCGACCTTTTGGCACAACCCCCGGAATCACTT | |
| | CCGCTGCCAGGTGCAGTTTCACGGCCTGTCCGAGGAGGATAAATGGCCTGAGGGCTCTCCA | |
| | AAGCCCGTGACACAGAATATCAGCGCGGAGGCGTGGGGAAGAGCGGACTGTGGCATTACAA | |
| | GCGCGTCCTATCAGCAGGGCGTGCTGTCCGCGACCATCCTGTACGAGATTCTGCTGGGCAA | |
| | GGCGACACTGTATGCGGTGCTGGTGTCCACCCTGGTGGTCATGGCGATGGTGAAGAGGAAA | |
| | AACTCTCGGGCGAAACGCTCTGGAAGCGGAGAGGGCAGAGGAAGTCTTCTAACATGCGGTG | |
| | ACGTGGAGGAGAATCCCGGCCCTATGGAGTCCTTTCTGGGCGGCGTGCTGCTGATCCTGTG | |
| | GCTGCAGGTGGACTGGGTGAAATCCCAGAAGATCGAGCAGAACTCTGAGGCGCTGAATATT | |
| | CAGGAGGGCAAGACCGCGACACTGACCTGCAACTACACAAATTATTCCCCAGCGTACCTGC | |
| | AGTGGTATAGGCAGGACCCAGGCAGGGGACCCGTGTTTCTGCTGCTGATTCGGGAGAATGA | |
| | GAAGGAGAAAAGAAAGGAGAGGCTGAAAGTGACCTTCGATACCACACTGAAGCAGTCTCTG | |
| | TTTCACATCACAGCGTCTCAGCCAGCGGACAGCGCGACCTACCTGTGCGCGCTGGACATCT | |
| | ACCCTCACGATATGAGATTCGGCGCGGGCACAAGGCTGACCGTGAAACCAAACATCCAGAA | |
| | TCCCGAGCCTGCGGTGTACCAGCTGAAGGACCCCCGCTCTCAGGATAGCACACTGTGCCTG | |
| | TTCACCGACTTTGATAGCCAGATCAACGTGCCTAAAACAATGGAGTCCGGCACCTTCATCA | |
| | CCGACAAGTGCGTGCTGGATATGAAAGCGATGGACTCCAAGTCTAACGGCGCGATCGCGTG | |
| | GTCCAATCAGACATCTTTCACCTGCCAGGATATCTTCAAGGAGACAAACGCGACCTATCCT | |
| | TCCTCTGACGTGCCATGTGATGCGACACTGACCGAGAAGAGCTTCGAGACAGACATGAACC | |
| | TGAATTTTCAGAATCTGCTGGTCATCGTGCTGAGAATCCTGCTGCTGAAGGTGGCGGGCTT | |
| | TAATCTGCTGATGACACTGCGGCTGTGGAGTTCCCGGGCGAAACGCTCTGGAAGCGGAGCG | |
| | ACCAATTTCAGCCTGCTGAAGCAGGCGGGCGATGTGGAGGAGAACCCTGGCCCAATGGATT | |
| | GGACCTGGATTCTGTTTCTGGTGGCCGCTGCCACAAGAGTGCACAGCAACTGGGTGAATGT | |
| | GATCAGCGACCTGAAGAAGATCGAGGATCTGATCCAGAGCATGCACATTGATGCCACCCTG | |
| | TACACAGAATCTGATGTGCACCCTAGCTGTAAAGTGACCGCCATGAAGTGTTTTCTGCTGG | |
| | AGCTGCAGGTGATTTCTCTGGAAAGCGGAGATGCCTCTATCCACGACACAGTGGAGAATCT | |
| | GATCATCCTGGCCAACAATAGCCTGAGCAGCAATGGCAATGTGACAGAGTCTGGCTGTAAG | |
| | GAGTGTGAGGAGCTGGAGGAGAAGAACATCAAGGAGTTTCTGCAGAGCTTTGTGCACATCG | |
| | TGCAGATGTTCATCAATACAAGCTCTGGCGGAGGATCTGGAGGAGGCGGATCTGGAGGAGG | |
| | AGGCAGTGGAGGCGGAGGATCTGGCGGAGGATCTCTGCAGATTACATGCCCTCCTCCAATG | |
| | TCTGTGGAGCACGCCGATATTTGGGTGAAGTCCTACAGCCTGTACAGCAGAGAGAGATACA | |
| | TCTGCAACAGCGGCTTTAAGAGAAAGGCCGGCACCTCTTCTCTGACAGAGTGCGTGCTGAA | |
| | TAAGGCCACAAATGTGGCCCACTGGACAACACCTAGCCTGAAGTGCATTAGAGATCCTGCC | |
| | CTGGTCCACCAGAGGCCTGCCCCTCCATCTACAGTGACAACAGCCGGAGTGACACCTCAGC | |
| | CTGAATCTCTGAGCCCTTCTGGAAAAGAACCTGCCGCCAGCTCTCCTAGCTCTAATAATAC | |
| | CGCCGCCACAACAGCCGCCATTGTGCCTGGATCTCAGCTGATGCCTAGCAAGTCTCCTAGC | |
| | ACAGGCACAACAGAGATCAGCAGCCACGAATCTTCTCACGGAACACCTTCTCAGACCACCG | |
| | CCAAGAATTGGGAGCTGACAGCCTCTGCCTCTCACCAGCCTCCAGGAGTGTATCCTCAGGG | |
| | CCACTCTGATACAACAGTGGCCATCAGCACATCTACAGTGCTGCTGTGTGGACTGTCTGCC | |
| | GTGTCTCTGCTGGCCTGTTACCTGAAGTCTAGACAGACACCTCCTCTGGCCTCTGTGGAGA | |
| | TGGAGGCCATGGAAGCCCTGCCTGTGACATGGGGAACAAGCAGCAGAGATGAAGACCTGGA | |
| | GAATTGTTCTCACCACCTG | |
| Plasmid | ATGGCGACAAGACTGCTGTGCTGGGCGGCGCTGTGCCTGCTGGGAGCGGAACTGACTGAAG | 326 |
| BP15TA | CGGGGGTCGCGCAGAGCCCTCGATACAAAATCATTGAGAAGCGGCAGTCTGTGGCGTTCTG | |
| | GTGCAACCCAATCAGCGGACACGCGACCCTGTACTGGTATCAGCAGATCCTGGGCCAGGGC | |
| | CCTAAGCTGCTGATTCAGTTCCAGAACAATGGCGTGGTGGACGATAGCCAGCTGCCAAAAG | |
| | ATAGATTTTCCGCGGAGAGGCTGAAGGGCGTGGACTCTACACTGAAAATTCAGCCTGCGAA | |
| | GCTGGAGGATAGCGCGGTGTACCTGTGCGCGAGCTCCCTGGACCCAGGCGATACCGGAGAG | |
| | CTGTTCTTTGGAGAGGGCAGCCGGCTGACAGTGCTGGAGGACCTGAGGAACGTGACCCCAC | |
| | CTAAAGTGAGCCTGTTCGAGCCATCCAAGGCGGAGATCGCGAATAAGCAGAAAGCGACCCT | |
| | GGTGTGCCTGGCGAGGGGCTTCTTTCCCGATCACGTGGAGCTGTCCTGGTGGGTGAACGGC | |
| | AAAGAGGTGCACTCTGGCGTGTGCACAGACCCTCAGGCGTACAAGGAGAGCAATTACTCCT | |
| | ATTGTCTGTCTAGCAGACTGAGGGTGAGCGCGACCTTTTGGCACAACCCCCGGAATCACTT | |
| | CCGCTGCCAGGTGCAGTTTCACGGCCTGTCCGAGGAGGATAAATGGCCTGAGGGCTCTCCA | |
| | AAGCCCGTGACACAGAATATCAGCGCGGAGGCGTGGGGAAGAGCGGACTGTGGCATTACAA | |
| | GCGCGTCCTATCAGCAGGGCGTGCTGTCCGCGACCATCCTGTACGAGATTCTGCTGGGCAA | |
| | GGCGACACTGTATGCGGTGCTGGTGTCCACCCTGGTGGTCATGGCGATGGTGAAGAGGAAA | |
| | AACTCTCGGGCGAAACGCTCTGGAAGCGGAGCGACCAATTTCAGCCTGCTGAAGCAGGCGG | |
| | GCGATGTGGAGGAGAACCCTGGCCCAATGGATTGGACCTGGATTCTGTTTCTGGTGGCCGC | |
| | TGCCACAAGAGTGCACAGCAACTGGGTGAATGTGATCAGCGACCTGAAGAAGATCGAGGAT | |
| | CTGATCCAGAGCATGCACATTGATGCCACCCTGTACACAGAATCTGATGTGCACCCTAGCT | |
| | GTAAAGTGACCGCCATGAAGTGTTTTCTGCTGGAGCTGCAGGTGATTTCTCTGGAAAGCGG | |
| | AGATGCCTCTATCCACGACACAGTGGAGAATCTGATCATCCTGGCCAACAATAGCCTGAGC | |
| | AGCAATGGCAATGTGACAGAGTCTGGCTGTAAGGAGTGTGAGGAGCTGGAGGAGAAGAACA | |
| | TCAAGGAGTTTCTGCAGAGCTTTGTGCACATCGTGCAGATGTTCATCAATACAAGCTCTGG | |
| | CGGAGGATCTGGAGGAGGCGGATCTGGAGGAGGAGGCAGTGGAGGCGGAGGATCTGGCGGA | |
| | GGATCTCTGCAGATTACATGCCCTCCTCCAATGTCTGTGGAGCACGCCGATATTTGGGTGA | |
| | AGTCCTACAGCCTGTACAGCAGAGAGAGATACATCTGCAACAGCGGCTTTAAGAGAAAGGC | |
| | CGGCACCTCTTCTCTGACAGAGTGCGTGCTGAATAAGGCCACAAATGTGGCCCACTGGACA | |
| | ACACCTAGCCTGAAGTGCATTAGAGATCCTGCCCTGGTCCACCAGAGGCCTGCCCCTCCAT | |
| | CTACAGTGACAACAGCCGGAGTGACACCTCAGCCTGAATCTCTGAGCCCTTCTGGAAAAGA | |
| | ACCTGCCGCCAGCTCTCCTAGCTCTAATAATACCGCCGCCACAACAGCCGCCATTGTGCCT | |
| | GGATCTCAGCTGATGCCTAGCAAGTCTCCTAGCACAGGCACAACAGAGATCAGCAGCCACG | |
| | AATCTTCTCACGGAACACCTTCTCAGACCACCGCCAAGAATTGGGAGCTGACAGCCTCTGC | |
| | CTCTCACCAGCCTCCAGGAGTGTATCCTCAGGGCCACTCTGATACAACAGTGGCCATCAGC | |
| | ACATCTACAGTGCTGCTGTGTGGACTGTCTGCCGTGTCTCTGCTGGCCTGTTACCTGAAGT | |
| | CTAGACAGACACCTCCTCTGGCCTCTGTGGAGATGGAGGCCATGGAAGCCCTGCCTGTGAC | |
| | ATGGGGAACAAGCAGCAGAGATGAAGACCTGGAGAATTGTTCTCACCACCTGCGGGCGAAA | |
| | CGCTCTGGAAGCGGAGAGGGCAGAGGAAGTCTTCTAACATGCGGTGACGTGGAGGAGAATC | |
| | CCGGCCCTATGGAGTCCTTTCTGGGCGGCGTGCTGCTGATCCTGTGGCTGCAGGTGGACTG | |
| | GGTGAAATCCCAGAAGATCGAGCAGAACTCTGAGGCGCTGAATATTCAGGAGGGCAAGACC | |
| | GCGACACTGACCTGCAACTACACAAATTATTCCCCAGCGTACCTGCAGTGGTATAGGCAGG | |
| | ACCCAGGCAGGGGACCCGTGTTTCTGCTGCTGATTCGGGAGAATGAGAAGGAGAAAAGAAA | |
| | GGAGAGGCTGAAAGTGACCTTCGATACCACACTGAAGCAGTCTCTGTTTCACATCACAGCG | |
| | TCTCAGCCAGCGGACAGCGCGACCTACCTGTGCGCGCTGGACATCTACCCTCACGATATGA | |
| | GATTCGGCGCGGGCACAAGGCTGACCGTGAAACCAAACATCCAGAATCCCGAGCCTGCGGT | |
| | GTACCAGCTGAAGGACCCCCGCTCTCAGGATAGCACACTGTGCCTGTTCACCGACTTTGAT | |
| | AGCCAGATCAACGTGCCTAAAACAATGGAGTCCGGCACCTTCATCACCGACAAGTGCGTGC | |
| | TGGATATGAAAGCGATGGACTCCAAGTCTAACGGCGCGATCGCGTGGTCCAATCAGACATC | |
| | TTTCACCTGCCAGGATATCTTCAAGGAGACAAACGCGACCTATCCTTCCTCTGACGTGCCA | |
| | TGTGATGCGACACTGACCGAGAAGAGCTTCGAGACAGACATGAACCTGAATTTTCAGAATC | |
| | TGCTGGTCATCGTGCTGAGAATCCTGCTGCTGAAGGTGGCGGGCTTTAATCTGCTGATGAC | |
| | ACTGCGGCTGTGGAGTTCC | |
| Plasmid | ATGGCGACAAGACTGCTGTGCTGGGCGGCGCTGTGCCTGCTGGGAGCGGAACTGACTGAAG | 327 |
| BT15PA | CGGGGGTCGCGCAGAGCCCTCGATACAAAATCATTGAGAAGCGGCAGTCTGTGGCGTTCTG | |
| | GTGCAACCCAATCAGCGGACACGCGACCCTGTACTGGTATCAGCAGATCCTGGGCCAGGGC | |
| | CCTAAGCTGCTGATTCAGTTCCAGAACAATGGCGTGGTGGACGATAGCCAGCTGCCAAAAG | |
| | ATAGATTTTCCGCGGAGAGGCTGAAGGGCGTGGACTCTACACTGAAAATTCAGCCTGCGAA | |
| | GCTGGAGGATAGCGCGGTGTACCTGTGCGCGAGCTCCCTGGACCCAGGCGATACCGGAGAG | |
| | CTGTTCTTTGGAGAGGGCAGCCGGCTGACAGTGCTGGAGGACCTGAGGAACGTGACCCCAC | |
| | CTAAAGTGAGCCTGTTCGAGCCATCCAAGGCGGAGATCGCGAATAAGCAGAAAGCGACCCT | |
| | GGTGTGCCTGGCGAGGGGCTTCTTTCCCGATCACGTGGAGCTGTCCTGGTGGGTGAACGGC | |
| | AAAGAGGTGCACTCTGGCGTGTGCACAGACCCTCAGGCGTACAAGGAGAGCAATTACTCCT | |
| | ATTGTCTGTCTAGCAGACTGAGGGTGAGCGCGACCTTTTGGCACAACCCCCGGAATCACTT | |
| | CCGCTGCCAGGTGCAGTTTCACGGCCTGTCCGAGGAGGATAAATGGCCTGAGGGCTCTCCA | |
| | AAGCCCGTGACACAGAATATCAGCGCGGAGGCGTGGGGAAGAGCGGACTGTGGCATTACAA | |
| | GCGCGTCCTATCAGCAGGGCGTGCTGTCCGCGACCATCCTGTACGAGATTCTGCTGGGCAA | |
| | GGCGACACTGTATGCGGTGCTGGTGTCCACCCTGGTGGTCATGGCGATGGTGAAGAGGAAA | |
| | AACTCTCGGGCGAAACGCTCTGGAAGCGGAGAGGGCAGAGGAAGTCTTCTAACATGCGGTG | |
| | ACGTGGAGGAGAATCCCGGCCCTATGGATTGGACCTGGATTCTGTTTCTGGTGGCCGCTGC | |
| | CACAAGAGTGCACAGCAACTGGGTGAATGTGATCAGCGACCTGAAGAAGATCGAGGATCTG | |
| | ATCCAGAGCATGCACATTGATGCCACCCTGTACACAGAATCTGATGTGCACCCTAGCTGTA | |
| | AAGTGACCGCCATGAAGTGTTTTCTGCTGGAGCTGCAGGTGATTTCTCTGGAAAGCGGAGA | |
| | TGCCTCTATCCACGACACAGTGGAGAATCTGATCATCCTGGCCAACAATAGCCTGAGCAGC | |
| | AATGGCAATGTGACAGAGTCTGGCTGTAAGGAGTGTGAGGAGCTGGAGGAGAAGAACATCA | |
| | AGGAGTTTCTGCAGAGCTTTGTGCACATCGTGCAGATGTTCATCAATACAAGCTCTGGCGG | |
| | AGGATCTGGAGGAGGCGGATCTGGAGGAGGAGGCAGTGGAGGCGGAGGATCTGGCGGAGGA | |
| | TCTCTGCAGATTACATGCCCTCCTCCAATGTCTGTGGAGCACGCCGATATTTGGGTGAAGT | |
| | CCTACAGCCTGTACAGCAGAGAGAGATACATCTGCAACAGCGGCTTTAAGAGAAAGGCCGG | |
| | CACCTCTTCTCTGACAGAGTGCGTGCTGAATAAGGCCACAAATGTGGCCCACTGGACAACA | |
| | CCTAGCCTGAAGTGCATTAGAGATCCTGCCCTGGTCCACCAGAGGCCTGCCCCTCCATCTA | |
| | CAGTGACAACAGCCGGAGTGACACCTCAGCCTGAATCTCTGAGCCCTTCTGGAAAAGAACC | |
| | TGCCGCCAGCTCTCCTAGCTCTAATAATACCGCCGCCACAACAGCCGCCATTGTGCCTGGA | |
| | TCTCAGCTGATGCCTAGCAAGTCTCCTAGCACAGGCACAACAGAGATCAGCAGCCACGAAT | |
| | CTTCTCACGGAACACCTTCTCAGACCACCGCCAAGAATTGGGAGCTGACAGCCTCTGCCTC | |
| | TCACCAGCCTCCAGGAGTGTATCCTCAGGGCCACTCTGATACAACAGTGGCCATCAGCACA | |
| | TCTACAGTGCTGCTGTGTGGACTGTCTGCCGTGTCTCTGCTGGCCTGTTACCTGAAGTCTA | |
| | GACAGACACCTCCTCTGGCCTCTGTGGAGATGGAGGCCATGGAAGCCCTGCCTGTGACATG | |
| | GGGAACAAGCAGCAGAGATGAAGACCTGGAGAATTGTTCTCACCACCTGCGGGCGAAACGC | |
| | TCTGGAAGCGGAGCGACCAATTTCAGCCTGCTGAAGCAGGCGGGCGATGTGGAGGAGAACC | |
| | CTGGCCCAATGGAGTCCTTTCTGGGCGGCGTGCTGCTGATCCTGTGGCTGCAGGTGGACTG | |
| | GGTGAAATCCCAGAAGATCGAGCAGAACTCTGAGGCGCTGAATATTCAGGAGGGCAAGACC | |
| | GCGACACTGACCTGCAACTACACAAATTATTCCCCAGCGTACCTGCAGTGGTATAGGCAGG | |
| | ACCCAGGCAGGGGACCCGTGTTTCTGCTGCTGATTCGGGAGAATGAGAAGGAGAAAAGAAA | |
| | GGAGAGGCTGAAAGTGACCTTCGATACCACACTGAAGCAGTCTCTGTTTCACATCACAGCG | |
| | TCTCAGCCAGCGGACAGCGCGACCTACCTGTGCGCGCTGGACATCTACCCTCACGATATGA | |
| | GATTCGGCGCGGGCACAAGGCTGACCGTGAAACCAAACATCCAGAATCCCGAGCCTGCGGT | |
| | GTACCAGCTGAAGGACCCCCGCTCTCAGGATAGCACACTGTGCCTGTTCACCGACTTTGAT | |
| | AGCCAGATCAACGTGCCTAAAACAATGGAGTCCGGCACCTTCATCACCGACAAGTGCGTGC | |
| | TGGATATGAAAGCGATGGACTCCAAGTCTAACGGCGCGATCGCGTGGTCCAATCAGACATC | |
| | TTTCACCTGCCAGGATATCTTCAAGGAGACAAACGCGACCTATCCTTCCTCTGACGTGCCA | |
| | TGTGATGCGACACTGACCGAGAAGAGCTTCGAGACAGACATGAACCTGAATTTTCAGAATC | |
| | TGCTGGTCATCGTGCTGAGAATCCTGCTGCTGAAGGTGGCGGGCTTTAATCTGCTGATGAC | |
| | ACTGCGGCTGTGGAGTTCC | |

[0498] The corresponding theoretical polypeptide translation product resulting from each ORF, not accounting for N-terminal signal sequence cleavage or ribosomal skipping at each P2A and T2A site, is shown in Table E3.

TABLE E3
Polypeptide sequences encoded by SB plasmid ORFs.

| | | SEQ |
|---|---|---|
| | | ID |
| Plasmid | Amino Acid Translation of ORF | NO: |
| Plasmid | MESFLGGVLLILWLQVDWVKSQKIEQNSEALNIQEGKTATLTCNYTNYSPAYLQWYRQDPG | 330 |
| APBT15 | RGPVFLLLIRENEKEKRKERLKVTFDTTLKQSLFHITASQPADSATYLCALDIYPHDMRFG | |
| | AGTRLTVKPNIQNPEPAVYQLKDPRSQDSTLCLFTDFDSQINVPKTMESGTFITDKCVLDM | |
| | KAMDSKSNGAIAWSNQTSFTCQDIFKETNATYPSSDVPCDATLTEKSFETDMNLNFQNLLV | |
| | IVLRILLLKVAGENLLMTLRLWSSRAKRSGSGATNFSLLKQAGDVEENPGPMATRLLCWAA | |
| | LCLLGAELTEAGVAQSPRYKIIEKRQSVAFWCNPISGHATLYWYQQILGQGPKLLIQFQNN | |
| | GVVDDSQLPKDRFSAERLKGVDSTLKIQPAKLEDSAVYLCASSLDPGDTGELFFGEGSRLT | |
| | VLEDLRNVTPPKVSLFEPSKAEIANKQKATLVCLARGFFPDHVELSWWVNGKEVHSGVCTD | |
| | PQAYKESNYSYCLSSRLRVSATFWHNPRNHFRCQVQFHGLSEEDKWPEGSPKPVTQNISAE | |
| | AWGRADCGITSASYQQGVLSATILYEILLGKATLYAVLVSTLVVMAMVKRKNSRAKRSGSG | |
| | EGRGSLLTCGDVEENPGPMDWTWILFLVAAATRVHSNWVNVISDLKKIEDLIQSMHIDATL | |
| | YTESDVHPSCKVTAMKCFLLELQVISLESGDASIHDTVENLIILANNSLSSNGNVTESGCK | |
| | ECEELEEKNIKEFLQSFVHIVQMFINTSSGGGSGGGGSGGGGSGGGGSGGGSLQITCPPPM | |
| | SVEHADIWVKSYSLYSRERYICNSGFKRKAGTSSLTECVLNKATNVAHWTTPSLKCIRDPA | |
| | LVHQRPAPPSTVTTAGVTPQPESLSPSGKEPAASSPSSNNTAATTAAIVPGSQLMPSKSPS | |
| | TGTTEISSHESSHGTPSQTTAKNWELTASASHQPPGVYPQGHSDTTVAISTSTVLLCGLSA | |
| | VSLLACYLKSRQTPPLASVEMEAMEALPVTWGTSSRDEDLENCSHHL | |
| Plasmid | MESFLGGVLLILWLQVDWVKSQKIEQNSEALNIQEGKTATLTCNYTNYSPAYLQWYRQDPG | 331 |
| ATBP15 | RGPVFLLLIRENEKEKRKERLKVTFDTTLKQSLFHITASQPADSATYLCALDIYPHDMRFG | |
| | AGTRLTVKPNIQNPEPAVYQLKDPRSQDSTLCLFTDFDSQINVPKTMESGTFITDKCVLDM | |
| | KAMDSKSNGAIAWSNQTSFTCQDIFKETNATYPSSDVPCDATLTEKSFETDMNLNFQNLLV | |
| | IVLRILLLKVAGFNLLMTLRLWSSRAKRSGSGEGRGSLLTCGDVEENPGPMATRLLCWAAL | |
| | CLLGAELTEAGVAQSPRYKIIEKRQSVAFWCNPISGHATLYWYQQILGQGPKLLIQFQNNG | |
| | VVDDSQLPKDRFSAERLKGVDSTLKIQPAKLEDSAVYLCASSLDPGDTGELFFGEGSRLTV | |
| | LEDLRNVTPPKVSLFEPSKAEIANKQKATLVCLARGFFPDHVELSWWVNGKEVHSGVCTDP | |
| | QAYKESNYSYCLSSRLRVSATFWHNPRNHFRCQVQFHGLSEEDKWPEGSPKPVTQNISAEA | |
| | WGRADCGITSASYQQGVLSATILYEILLGKATLYAVLVSTLVVMAMVKRKNSRAKRSGSGA | |
| | TNFSLLKQAGDVEENPGPMDWTWILFLVAAATRVHSNWVNVISDLKKIEDLIQSMHIDATL | |
| | YTESDVHPSCKVTAMKCFLLELQVISLESGDASIHDTVENLIILANNSLSSNGNVTESGCK | |
| | ECEELEEKNIKEFLQSFVHIVQMFINTSSGGGSGGGGSGGGGSGGGGSGGGSLQITCPPPM | |
| | SVEHADIWVKSYSLYSRERYICNSGFKRKAGTSSLTECVLNKATNVAHWTTPSLKCIRDPA | |
| | LVHQRPAPPSTVTTAGVTPQPESLSPSGKEPAASSPSSNNTAATTAAIVPGSQLMPSKSPS | |
| | TGTTEISSHESSHGTPSQTTAKNWELTASASHQPPGVYPQGHSDTTVAISTSTVLLCGLSA | |
| | VSLLACYLKSRQTPPLASVEMEAMEALPVTWGTSSRDEDLENCSHHL | |
| Plasmid | MESFLGGVLLILWLQVDWVKSQKIEQNSEALNIQEGKTATLTCNYTNYSPAYLQWYRQDPG | 332 |
| AP15TB | RGPVFLLLIRENEKEKRKERLKVTFDTTLKQSLFHITASQPADSATYLCALDIYPHDMRFG | |
| | AGTRLTVKPNIQNPEPAVYQLKDPRSQDSTLCLFTDFDSQINVPKTMESGTFITDKCVLDM | |
| | KAMDSKSNGAIAWSNQTSFTCQDIFKETNATYPSSDVPCDATLTEKSFETDMNLNFQNLLV | |
| | IVLRILLLKVAGFNLLMTLRLWSSRAKRSGSGATNFSLLKQAGDVEENPGPMDWTWILFLV | |
| | AAATRVHSNWVNVISDLKKIEDLIQSMHIDATLYTESDVHPSCKVTAMKCFLLELQVISLE | |
| | SGDASIHDTVENLIILANNSLSSNGNVTESGCKECEELEEKNIKEFLQSFVHIVQMFINTS | |
| | SGGGSGGGGSGGGGSGGGGSGGGSLQITCPPPMSVEHADIWVKSYSLYSRERYICNSGFKR | |
| | KAGTSSLTECVLNKATNVAHWTTPSLKCIRDPALVHQRPAPPSTVTTAGVTPQPESLSPSG | |
| | KEPAASSPSSNNTAATTAAIVPGSQLMPSKSPSTGTTEISSHESSHGTPSQTTAKNWELTA | |
| | SASHQPPGVYPQGHSDTTVAISTSTVLLCGLSAVSLLACYLKSRQTPPLASVEMEAMEALP | |
| | VTWGTSSRDEDLENCSHHLRAKRSGSGEGRGSLLTCGDVEENPGPMATRLLCWAALCLLGA | |
| | ELTEAGVAQSPRYKIIEKRQSVAFWCNPISGHATLYWYQQILGQGPKLLIQFQNNGVVDDS | |
| | QLPKDRFSAERLKGVDSTLKIQPAKLEDSAVYLCASSLDPGDTGELFFGEGSRLTVLEDLR | |
| | NVTPPKVSLFEPSKAEIANKQKATLVCLARGFFPDHVELSWWVNGKEVHSGVCTDPQAYKE | |
| | SNYSYCLSSRLRVSATFWHNPRNHFRCQVQFHGLSEEDKWPEGSPKPVTQNISAEAWGRAD | |
| | CGITSASYQQGVLSATILYEILLGKATLYAVLVSTLVVMAMVKRKNS | |
| Plasmid | MESFLGGVLLILWLQVDWVKSQKIEQNSEALNIQEGKTATLTCNYTNYSPAYLQWYRQDPG | 333 |
| AT15PB | RGPVFLLLIRENEKEKRKERLKVTFDTTLKQSLFHITASQPADSATYLCALDIYPHDMRFG | |
| | AGTRLTVKPNIQNPEPAVYQLKDPRSQDSTLCLFTDFDSQINVPKTMESGTFITDKCVLDM | |
| | KAMDSKSNGAIAWSNQTSFTCQDIFKETNATYPSSDVPCDATLTEKSFETDMNLNFQNLLV | |
| | IVLRILLLKVAGFNLLMTLRLWSSRAKRSGSGEGRGSLLTCGDVEENPGPMDWTWILFLVA | |
| | AATRVHSNWVNVISDLKKIEDLIQSMHIDATLYTESDVHPSCKVTAMKCFLLELQVISLES | |
| | GDASIHDTVENLIILANNSLSSNGNVTESGCKECEELEEKNIKEFLQSFVHIVQMFINTSS | |
| | GGGSGGGGSGGGGSGGGGSGGGSLQITCPPPMSVEHADIWVKSYSLYSRERYICNSGFKRK | |
| | AGTSSLTECVLNKATNVAHWTTPSLKCIRDPALVHQRPAPPSTVTTAGVTPQPESLSPSGK | |
| | EPAASSPSSNNTAATTAAIVPGSQLMPSKSPSTGTTEISSHESSHGTPSQTTAKNWELTAS | |
| | ASHQPPGVYPQGHSDTTVAISTSTVLLCGLSAVSLLACYLKSRQTPPLASVEMEAMEALPV | |
| | TWGTSSRDEDLENCSHHLRAKRSGSGATNFSLLKQAGDVEENPGPMATRLLCWAALCLLGA | |
| | ELTEAGVAQSPRYKIIEKRQSVAFWCNPISGHATLYWYQQILGQGPKLLIQFQNNGVVDDS | |
| | QLPKDRFSAERLKGVDSTLKIQPAKLEDSAVYLCASSLDPGDTGELFFGEGSRLTVLEDLR | |
| | NVTPPKVSLFEPSKAEIANKQKATLVCLARGFFPDHVELSWWVNGKEVHSGVCTDPQAYKE | |
| | SNYSYCLSSRLRVSATFWHNPRNHFRCQVQFHGLSEEDKWPEGSPKPVTQNISAEAWGRAD | |
| | CGITSASYQQGVLSATILYEILLGKATLYAVLVSTLVVMAMVKRKNS | |
| Plasmid | MATRLLCWAALCLLGAELTEAGVAQSPRYKIIEKRQSVAFWCNPISGHATLYWYQQILGQG | 334 |
| BPAT15 | PKLLIQFQNNGVVDDSQLPKDRFSAERLKGVDSTLKIQPAKLEDSAVYLCASSLDPGDTGE | |
| | LFFGEGSRLTVLEDLRNVTPPKVSLFEPSKAEIANKQKATLVCLARGFFPDHVELSWWVNG | |
| | KEVHSGVCTDPQAYKESNYSYCLSSRLRVSATFWHNPRNHFRCQVQFHGLSEEDKWPEGSP | |
| | KPVTQNISAEAWGRADCGITSASYQQGVLSATILYEILLGKATLYAVLVSTLVVMAMVKRK | |
| | NSRAKRSGSGATNFSLLKQAGDVEENPGPMESFLGGVLLILWLQVDWVKSQKIEQNSEALN | |
| | IQEGKTATLTCNYTNYSPAYLQWYRQDPGRGPVFLLLIRENEKEKRKERLKVTFDTTLKQS | |
| | LFHITASQPADSATYLCALDIYPHDMRFGAGTRLTVKPNIQNPEPAVYQLKDPRSQDSTLC | |
| | LFTDFDSQINVPKTMESGTFITDKCVLDMKAMDSKSNGAIAWSNQTSFTCQDIFKETNATY | |
| | PSSDVPCDATLTEKSFETDMNLNFQNLLVIVLRILLLKVAGENLLMTLRLWSSRAKRSGSG | |
| | EGRGSLLTCGDVEENPGPMDWTWILFLVAAATRVHSNWVNVISDLKKIEDLIQSMHIDATL | |
| | YTESDVHPSCKVTAMKCFLLELQVISLESGDASIHDTVENLIILANNSLSSNGNVTESGCK | |
| | ECEELEEKNIKEFLQSFVHIVQMFINTSSGGGSGGGGSGGGGSGGGGSGGGSLQITCPPPM | |
| | SVEHADIWVKSYSLYSRERYICNSGFKRKAGTSSLTECVLNKATNVAHWTTPSLKCIRDPA | |
| | LVHQRPAPPSTVTTAGVTPQPESLSPSGKEPAASSPSSNNTAATTAAIVPGSQLMPSKSPS | |
| | TGTTEISSHESSHGTPSQTTAKNWELTASASHQPPGVYPQGHSDTTVAISTSTVLLCGLSA | |
| | VSLLACYLKSRQTPPLASVEMEAMEALPVTWGTSSRDEDLENCSHHL | |
| Plasmid | MATRLLCWAALCLLGAELTEAGVAQSPRYKIIEKRQSVAFWCNPISGHATLYWYQQILGQG | 335 |
| BTAP15 | PKLLIQFQNNGVVDDSQLPKDRFSAERLKGVDSTLKIQPAKLEDSAVYLCASSLDPGDTGE | |
| | LFFGEGSRLTVLEDLRNVTPPKVSLFEPSKAEIANKQKATLVCLARGFFPDHVELSWWVNG | |
| | KEVHSGVCTDPQAYKESNYSYCLSSRLRVSATFWHNPRNHFRCQVQFHGLSEEDKWPEGSP | |
| | KPVTQNISAEAWGRADCGITSASYQQGVLSATILYEILLGKATLYAVLVSTLVVMAMVKRK | |
| | NSRAKRSGSGEGRGSLLTCGDVEENPGPMESFLGGVLLILWLQVDWVKSQKIEQNSEALNI | |
| | QEGKTATLTCNYTNYSPAYLQWYRQDPGRGPVFLLLIRENEKEKRKERLKVTFDTTLKQSL | |
| | FHITASQPADSATYLCALDIYPHDMRFGAGTRLTVKPNIQNPEPAVYQLKDPRSQDSTLCL | |
| | FTDFDSQINVPKTMESGTFITDKCVLDMKAMDSKSNGAIAWSNQTSFTCQDIFKETNATYP | |
| | SSDVPCDATLTEKSFETDMNLNFQNLLVIVLRILLLKVAGENLLMTLRLWSSRAKRSGSGA | |
| | TNFSLLKQAGDVEENPGPMDWTWILFLVAAATRVHSNWVNVISDLKKIEDLIQSMHIDATL | |
| | YTESDVHPSCKVTAMKCFLLELQVISLESGDASIHDTVENLIILANNSLSSNGNVTESGCK | |
| | ECEELEEKNIKEFLQSFVHIVQMFINTSSGGGSGGGGSGGGGSGGGGSGGGSLQITCPPPM | |
| | SVEHADIWVKSYSLYSRERYICNSGFKRKAGTSSLTECVLNKATNVAHWTTPSLKCIRDPA | |
| | LVHQRPAPPSTVTTAGVTPQPESLSPSGKEPAASSPSSNNTAATTAAIVPGSQLMPSKSPS | |
| | TGTTEISSHESSHGTPSQTTAKNWELTASASHQPPGVYPQGHSDTTVAISTSTVLLCGLSA | |
| | VSLLACYLKSRQTPPLASVEMEAMEALPVTWGTSSRDEDLENCSHHL | |
| Plasmid | MATRLLCWAALCLLGAELTEAGVAQSPRYKIIEKRQSVAFWCNPISGHATLYWYQQILGQG | 336 |
| BP15TA | PKLLIQFQNNGVVDDSQLPKDRFSAERLKGVDSTLKIQPAKLEDSAVYLCASSLDPGDTGE | |
| | LFFGEGSRLTVLEDLRNVTPPKVSLFEPSKAEIANKQKATLVCLARGFFPDHVELSWWVNG | |
| | KEVHSGVCTDPQAYKESNYSYCLSSRLRVSATFWHNPRNHFRCQVQFHGLSEEDKWPEGSP | |
| | KPVTQNISAEAWGRADCGITSASYQQGVLSATILYEILLGKATLYAVLVSTLVVMAMVKRK | |
| | NSRAKRSGSGATNFSLLKQAGDVEENPGPMDWTWILFLVAAATRVHSNWVNVISDLKKIED | |
| | LIQSMHIDATLYTESDVHPSCKVTAMKCELLELQVISLESGDASIHDTVENLIILANNSLS | |
| | SNGNVTESGCKECEELEEKNIKEFLQSFVHIVQMFINTSSGGGSGGGGSGGGGSGGGGSGG | |
| | GSLQITCPPPMSVEHADIWVKSYSLYSRERYICNSGFKRKAGTSSLTECVLNKATNVAHWT | |
| | TPSLKCIRDPALVHQRPAPPSTVTTAGVTPQPESLSPSGKEPAASSPSSNNTAATTAAIVP | |
| | GSQLMPSKSPSTGTTEISSHESSHGTPSQTTAKNWELTASASHQPPGVYPQGHSDTTVAIS | |
| | TSTVLLCGLSAVSLLACYLKSRQTPPLASVEMEAMEALPVTWGTSSRDEDLENCSHHLRAK | |
| | RSGSGEGRGSLLTCGDVEENPGPMESFLGGVLLILWLQVDWVKSQKIEQNSEALNIQEGKT | |
| | ATLTCNYTNYSPAYLQWYRQDPGRGPVFLLLIRENEKEKRKERLKVTFDTTLKQSLFHITA | |
| | SQPADSATYLCALDIYPHDMRFGAGTRLTVKPNIQNPEPAVYQLKDPRSQDSTLCLFTDED | |
| | SQINVPKTMESGTFITDKCVLDMKAMDSKSNGAIAWSNQTSFTCQDIFKETNATYPSSDVP | |
| | CDATLTEKSFETDMNLNFQNLLVIVLRILLLKVAGENLLMTLRLWSS | |
| Plasmid | MATRLLCWAALCLLGAELTEAGVAQSPRYKIIEKRQSVAFWCNPISGHATLYWYQQILGQG | 337 |
| BT15PA | PKLLIQFQNNGVVDDSQLPKDRFSAERLKGVDSTLKIQPAKLEDSAVYLCASSLDPGDTGE | |
| | LFFGEGSRLTVLEDLRNVTPPKVSLFEPSKAEIANKQKATLVCLARGFFPDHVELSWWVNG | |
| | KEVHSGVCTDPQAYKESNYSYCLSSRLRVSATFWHNPRNHFRCQVQFHGLSEEDKWPEGSP | |
| | KPVTQNISAEAWGRADCGITSASYQQGVLSATILYEILLGKATLYAVLVSTLVVMAMVKRK | |
| | NSRAKRSGSGEGRGSLLTCGDVEENPGPMDWTWILFLVAAATRVHSNWVNVISDLKKIEDL | |
| | IQSMHIDATLYTESDVHPSCKVTAMKCFLLELQVISLESGDASIHDTVENLIILANNSLSS | |
| | NGNVTESGCKECEELEEKNIKEFLQSFVHIVQMFINTSSGGGSGGGGSGGGGSGGGGSGGG | |
| | SLQITCPPPMSVEHADIWVKSYSLYSRERYICNSGFKRKAGTSSLTECVLNKATNVAHWTT | |
| | PSLKCIRDPALVHQRPAPPSTVTTAGVTPQPESLSPSGKEPAASSPSSNNTAATTAAIVPG | |
| | SQLMPSKSPSTGTTEISSHESSHGTPSQTTAKNWELTASASHQPPGVYPQGHSDTTVAIST | |
| | STVLLCGLSAVSLLACYLKSRQTPPLASVEMEAMEALPVTWGTSSRDEDLENCSHHLRAKR | |
| | SGSGATNFSLLKQAGDVEENPGPMESFLGGVLLILWLQVDWVKSQKIEQNSEALNIQEGKT | |
| | ATLTCNYTNYSPAYLQWYRQDPGRGPVFLLLIRENEKEKRKERLKVTFDTTLKQSLFHITA | |
| | SQPADSATYLCALDIYPHDMRFGAGTRLTVKPNIQNPEPAVYQLKDPRSQDSTLCLFTDED | |
| | SQINVPKTMESGTFITDKCVLDMKAMDSKSNGAIAWSNQTSFTCQDIFKETNATYPSSDVP | |
| | CDATLTEKSFETDMNLNFQNLLVIVLRILLLKVAGENLLMTLRLWSS | |

[0499] For control purposes, three additional SB transposon plasmids were prepared. Plasmid 15 contains a monocistronic expression cassette, Cassette 15, encoding mbIL15. Plasmid APB contains a bicistronic expression cassette, Cassette APB, encoding TCRα (5′) and TCRβ (3′) with an intervening fP2A element. Plasmid BPA contains a bicistronic expression cassette, Cassette BPA, encoding TCRβ (5′) and TCRα (3′) with an intervening fP2A element. These expression cassettes, including suitable transcriptional regulatory elements, were inserted between the ITRs of SB transposon plasmids. The 5′ to 3′ order of elements in the ORF of each control expression cassette and SB Plasmid is shown in Table E4, and schematics of the ORFs of these three expression cassettes are shown in FIG. 2B.

TABLE E4
Control SB transposon plasmids.

| Plasmid Name | Cassette Name | Order of Elements (5′ to 3′) |
|---|---|---|
| Plasmid 15 | Cassette 15 | mbIL15 |
| Plasmid APB | Cassette APB | TCRα-fP2A-TCRβ |
| Plasmid BPA | Cassette BPA | TCRβ-fP2A-TCRα |

[0500] A plasmid encoding SB11 transposase, Plasmid TA, was also constructed.

### Example 2: Generation and Evaluation of T Cells

[0501] This Example describes the generation and evaluation of T cells co-expressing TCRα, TCRβ, and mbIL15 from the plasmids described in Example 1. A schematic of the gene transfer process for both double transposition (using separate plasmids encoding TCRα/TCRβ and mbIL15) and single transposition (using a tricistronic plasmid encoding TCRα/TCRβ and mbIL15 together) is shown in FIG. 3.

[0502] Briefly, peripheral blood mononuclear cells (PBMCs) were enriched from leukapheresis product obtained from a normal donor (Discovery Life Sciences, Austin, TX). The resulting PBMCs were collected, cryopreserved, and stored in the vapor phase of a liquid nitrogen tank.

[0503] To generate the TCR-T cells described in this Example 2, the plasmids described in Example 1 were electroporated into the enriched PBMCs. Briefly, cryopreserved PBMCs were thawed, resuspended in supplemented media, and incubated in a 37° C./5% CO₂ incubator for one hour. The PBMC test articles listed in Table E5 were then prepared.

TABLE E5
PBMC test articles.

| Group | Name | Description |
|---|---|---|
| 1 | NT cells | Non-transposed PBMCs |
| 2 | mbIL15 cells | PBMCs transposed with Plasmid 15 and Plasmid TA |
| 3 | APB cells | PBMCs transposed with Plasmid APB and Plasmid TA |
| 4 | BPA cells | PBMCs transposed with Plasmid BPA and Plasmid TA |
| 5 | APB+15 cells | PBMCs transposed with Plasmid APB, Plasmid 15, and Plasmid TA |
| 6 | BPA+15 cells | PBMCs transposed with Plasmid BPA, Plasmid 15, and Plasmid TA |
| 7 | APBT15 cells | PBMCs transposed with Plasmid APBT15 and Plasmid TA |
| 8 | ATBP15 cells | PBMCs transposed with Plasmid ATBP15 and Plasmid TA |
| 9 | AP15TB cells | PBMCs transposed with Plasmid AP15TB and Plasmid TA |
| 10 | AT15PB cells | PBMCs transposed with Plasmid AT15PB and Plasmid TA |
| 11 | BPAT15 cells | PBMCs transposed with Plasmid BPAT15 and Plasmid TA |
| 12 | BTAP15 cells | PBMCs transposed with Plasmid BTAP15 and Plasmid TA |
| 13 | BP15TA cells | PBMCs transposed with Plasmid BP15TA and Plasmid TA |
| 14 | BT15PA cells | PBMCs transposed with Plasmid BT15PA and Plasmid TA |

[0504] Test articles were prepared as follows:

[0505] Group 1: Rested cells were harvested, spun down, resuspended in supplemented media, and incubated in a 37° C./5% CO₂ incubator overnight.

[0506] Groups 2-14: Rested cells were harvested, spun down, resuspended in electroporation buffer together with the plasmids listed in Table E5, and electroporated. Following electroporation, cell suspensions were collected, transferred to supplemented media, and incubated in a 37° C./5% CO₂ incubator overnight.

[0507] Within 24 hours post-electroporation (Day 1), the cells were harvested from culture, counted, and sampled by flow cytometry to determine mbIL15 and TCR transgene expression. Briefly, up to 1×10⁶ cells of each test article were stained with human Fc Block (BD Biosciences 564220) first to reduce background staining for 10 minutes at room temperature. Cell suspensions were further stained with fluorochrome conjugated antibodies (listed in Table 1) diluted in Brilliant Stain Buffer (BD Biosciences 566349) for 30 minutes at 4° C. TCR expression was detected using Percp-Cy5.5 conjugated anti-mouse TCRβ antibody specific for the murine constant region of TCRβ. Other fluorescently conjugated antibodies used included: CD3 (Clone OKT-3), IL-15 (34559), CD8 (Clone RPA-T8), and Invitrogen violet live/Dead dye (Table E6).

TABLE E6
Fluorescently Conjugated Antibodies.

| Antibody Target | Clone | Fluorophore | Company & Cat # |
|---|---|---|---|
| Live/Dead | | Pacific Blue | Invitrogen L34955A |
| Human CD3 | OKT3 | BV510 | Biolegend 317332 |
| Human CD8 | RPA-T8 | PE-Cy7 | BD Biosciences 557746 |
| Human IL-15 | 34559 | PE | R&D Systems IC2471P |
| Mouse TCR | H57-597 | Percp-Cy5.5 | BD Biosciences 560657 |

[0508] Cells were washed with FACS buffer (PBS, 2% FBS, 0.1% sodium azide). Data were acquired using an NovoCyte Quanteon flow cytometer system (Agilent) and analyzed with FlowJo software (version 10.7.1; TreeStar, Ashland, OR) to determine the percentage of each transgenic subpopulation (mbIL15⁺mTCR⁺, mbIL15^{neg}mTCR⁺, mbIL15⁺mTCR^{neg}, mbIL15^{neg}mTCR^{neg}) present in each test article. Unless described otherwise, transgene expression was assessed on gated cell events, singlets, viable events, and CD3⁺ cells.

[0509] Results of flow cytometry are shown in FIG. 4 and Table E7.

TABLE E7
Day 1 post-electroporation specifications and transgene
expression of genetically modified T cells.

| | | Viability | mbIL15⁺ | mTCR⁺ | mbIL15⁺mTCR⁺ |
|---|---|---|---|---|---|
| Group | Name | (%) | (% CD3⁺) | (% CD3⁺) | (% CD3⁺) |
| 1 | NT cells | 97.5 | N/A | N/A | N/A |
| 2 | mbIL15 cells | 83.9 | 33.4 | N/A | N/A |
| 3 | APB cells | 68.3 | N/A | 18.6 | N/A |
| 4 | BPA cells | 75.4 | N/A | 26.1 | N/A |
| 5 | APB+15 cells | 65.7 | 11.5 | 9.99 | 5.07 |
| 6 | BPA+15 cells | 78.5 | 20.7 | 23.0 | 15.2 |
| 7 | APBT15 cells | 78.0 | 9.91 | 21.9 | 7.60 |
| 8 | ATBP15 cells | 82.7 | 13.9 | 29.1 | 11.1 |
| 9 | AP15TB cells | 84.1 | 9.45 | 20.6 | 6.05 |
| 10 | AT15PB cells | 81.6 | 12.6 | 23.2 | 8.58 |
| 11 | BPAT15 cells | 64.3 | 3.41 | 8.88 | 2.11 |
| 12 | BTAP15 cells | 73.8 | 8.66 | 20.9 | 5.47 |
| 13 | BP15TA cells | 83.7 | 13.3 | 29.9 | 9.52 |
| 14 | BT15PA cells | 74.5 | 6.68 | 12.9 | 3.12 |

### Example 3: Evaluation of Cell Culture Conditions for Recovery and Expansion of Transduced T Cells

[0510] This Example describes the evaluation of cell culture conditions for recovery and expansion of T cells electroporated to co-express TCRα, TCRβ, and mbIL15 from plasmids described in Example 1. TCR-T cells described in this Example 3 were generated similarly to those described in Example 2 except as indicated below.

[0511] Briefly, cryopreserved PBMCs were thawed, resuspended in 50:50 media and placed in a 37° C./5% CO₂ incubator before electroporation.

[0512] Test articles as listed below in Table E8 were then prepared as follows:

TABLE E8
PBMC test articles.

| Group | Name | Description |
|---|---|---|
| 1 | NT cells | Non-transduced PBMCs |
| 2 | BPA cells | PBMCs transduced with Plasmid |
| | | BPA and Plasmid TA |
| 3 | BPA+15 cells | PBMCs transduced with Plasmid |
| | | BPA, Plasmid 15, and Plasmid TA |

[0513] Group 1: Cells were harvested, spun down, resuspended in recovery media 1 (containing IL-2+IL-21, see below), and incubated in a 37° C./5% CO₂ incubator overnight.

[0514] Group 2: Cells were harvested, spun down, resuspended in electroporation buffer together with the plasmids listed in Table E8, and electroporated. Following electroporation, cell suspensions were collected, transferred to recovery media 1 (containing IL-2+IL-21, see below) and incubated in a 37° C./5% CO₂ incubator overnight.

[0515] Group 3: Cells were harvested, spun down, resuspended in electroporation buffer together with the plasmids listed in Table E8, and electroporated. Following electroporation, cell suspensions were collected, transferred to one of recovery media 1-9 (described below), and incubated in a 37° C./5% CO₂ incubator overnight.

[0516] The following recovery media were tested:
[0517] Recovery media 1: 50:50 media containing IL-2+IL-21
[0518] Recovery media 2: 50:50 media containing IL-2+IL-21+N-acetylcysteine (NAC)
[0519] Recovery media 3: 50:50 media containing NAC
[0520] Recovery media 4: 50:50 media containing IL-7
[0521] Recovery media 5: 50:50 media containing IL-7+NAC
[0522] Recovery media 6: 50:50 media containing IL-15
[0523] Recovery media 7: 50:50 media containing IL-15+NAC
[0524] Recovery media 8: 50:50 media containing IL-7+IL-15
[0525] Recovery media 9: 50:50 media containing IL-7+IL-15+NAC)

[0526] Within 24 hours post-electroporation (Day 1), mTCR positive (mTCR+) cells were isolated using mTCR antibody and MACS® Cell Separation system (Miltenyi Biotec). Live TCR+ cells that had been incubated in recovery media 9 were transferred to G-REX® culture plates (Wilson Wolf Manufacturing) and incubated with one of first expansion media 1-5 (described below) with irradiated feeder cells+OKT3 antibody. Live TCR+ cells from Group 2 were transferred to G-REX® culture plates and incubated with first expansion media 1 with irradiated feeder cells+OKT3 antibody. The same number of Group 1 cells were transferred to G-REX® culture plates (Wilson Wolf Manufacturing) and incubated with first expansion media 1 with irradiated feeder cells+OKT3 antibody.
[0527] First expansion media 1: 50:50 media containing IL-2+IL-21
[0528] First expansion media 2: 50:50 media containing IL-2
[0529] First expansion media 3: 50:50 media containing IL-21+IL-7*
[0530] First expansion media 4: 50:50 media containing IL-21+IL-7
[0531] First expansion media 5: 50:50 media containing IL-21+IL-7*+IL-12*

[0532] Where a “*” appears beside a cytokine, it indicates that the cytokine was added on day 1 only.

[0533] Cells were fed with 50:50 media containing the indicated cytokines regularly. After 13 days of first phase expansion, TCR+ cells were isolated with mTCR antibody. The isolated TCR+ T cells that had been incubated with first expansion media 5 were transferred to G-REX® culture plates (Wilson Wolf Manufacturing) and incubated with one of second expansion media 1-4 (described below) with irradiated feeder cells+OKT3 antibody.
[0534] Second expansion media 1: 50:50 media containing IL-2 (3000 U/ml)
[0535] Second expansion media 2: 50:50 media containing IL-2 (300 U/ml)
[0536] Second expansion media 3: 50:50 media containing IL-21+NAC+IL-12*
[0537] Second expansion media 4: 50:50 media containing IL-21+NAC+IL-2 (30 U/ml)+IL-12*

[0538] Where a “*” appears beside a cytokine, it indicates that the cytokine was added on day 1 of the second expansion phase only.

[0539] During this second expansion phase, cells were regularly fed with IL-2 (for the cells in second expansion media 1 and 2) or IL-21 (for the cells in second expansion media 3 and 4). After 15 days of second phase expansion, cells were harvested, and expression of mTCR and mbIL15 was detected on CD3+ gated population with mouse TCR beta antibody and IL-15 antibody as described in Example 2. Cell count and viability was accessed with a NC3000 cell counter. Unless described otherwise, transgene expression was assessed on gated cell events, singlets, viable events, and CD3⁺ cells.

[0540] Expression of mTCR and mbIL15 was assessed for each test article at three separate time points: 1) after electroporation (Day 1); 2) after first expansion phase (Day 13); and after second expansion phase (Day 28). Fold expansion was assessed for each test article after the second expansion phase (Day 28).

[0541] TCR and mbIL15 expression results detected by flow cytometry after electroporation are shown in FIG. 5A-5C. TCR and mbIL15 expression results detected by flow cytometry after the first expansion phase are shown in FIG. 6A-6C and FIG. 7A-7C. TCR and mbIL15 expression results detected by flow cytometry after the second expansion phase are shown in FIG. 8A-C.

[0542] Fold expansion of cell number during the second expansion phase is shown in FIG. 9.

[0543] Conclusions: Addition of N-acetylcysteine (NAC) to overnight recovery culture media containing cytokines enhanced transgene expression after electroporation. Moreover, addition of IL-7 and IL-15 to recovery media enhanced the expression of transgene after electroporation. In case of IL-7, addition to first expansion media increased transgene expression after expansion phase, but only when added on the first day of the expansion phase. Compared to the IL-2 treatment, the incubation of cells with NAC and IL-21 significantly decreased fold expansion when added to cell culture media during second phase expansion. Similar to the addition of IL-7, when IL-12 was added to expansion media on the first day of the first expansion phase, increased transgene expression was seen.

### Example 4: Generation and Evaluation of Expanded T Cells

[0544] This Example describes the generation and evaluation of T cells co-expressing TCRα, TCRβ, and mbIL15 from the plasmids described in Example 1. TCR-T cells described in this Example 4 were generated similarly to those described in Example 2 except as indicated below.

[0545] Briefly, cryopreserved PBMCs were thawed, resuspended in supplemented media (IL-7+IL-15), and incubated in a 37° C./5% CO₂ incubator for one hour.

[0546] Test articles as listed above in Table E5 were then prepared as follows:

[0547] Group 1: Rested cells were harvested, spun down, resuspended in recovery media (50:50 media containing IL-7+IL-15+n-acetylcysteine (NAC)), and incubated in a 37° C./5% CO₂ incubator overnight.

[0548] Groups 2-14: Rested cells were harvested, spun down, resuspended in electroporation buffer together with the plasmids listed in Table E5, and electroporated. Following electroporation, cell suspensions were collected, transferred to recovery media (50:50 media containing IL-7+IL-15+NAC), and incubated in a 37° C./5% CO₂ incubator overnight.

[0549] Groups 3-14: Within 24 hours post-electroporation (Day 1), mTCR positive (mTCR+) cells were isolated using mTCR antibody and MACS® Cell Separation system (Miltenyi Biotec). Live cells from groups 1 & 2 and live TCR+ cells from groups 3-14 were transferred to G-REX® culture plates (Wilson Wolf Manufacturing) and incubated with a first expansion media (50:50 media containing IL-21+IL-7+OKT3+irradiated feeder cells).

[0550] Cells were fed with regularly with cytokines. After 13 days of first phase expansion, cells were harvested, and expression of mTCR and mbIL15 was detected on CD3+ gated population with mouse TCR beta antibody and IL-15 antibody as described in Example 2. Cell count and viability was accessed with a NC3000 cell counter. Unless described otherwise, transgene expression was assessed on gated cell events, singlets, viable events, and CD3⁺ cells.

[0551] Expression of mTCR and mbIL15 and cell viability was assessed for each test article at two separate time points: 1) after electroporation (Day 1), and 2) after first expansion phase (Day 13).

[0552] TCR expression after electroporation (Day 1) is shown in FIG. 10A-10B. FIG. 10A provides representative TCR expression data from each test article. FIG. 10B provides TCR expression data from three donors presented as % mTCR+ cells out of CD3+ cells.

[0553] TCR and mbIL15 expression after first phase expansion (Day 13) is shown in FIG. 11A-11C. FIG. 11A provides representative TCR and mbIL15 expression data from each test article. FIG. 11B provides TCR expression data from three donors presented as % mTCR+ cells out of CD3+ cells and FIG. 11C provides % TCR+mbIL15+ cells out of CD3+ cells.

[0554] TCR+ and TCR+mbIL15+ cell number was also assessed after first phase expansion (Day 13) as shown in FIG. 12A-12B. FIG. 12A provides TCR expression data from three donors presented as total number of mTCR+ T cells and FIG. 12B provides total number of TCR+mbIL15+ T cells.

[0555] Cell viability after electroporation (Day 1) and after first phase expansion (Day 13) is shown in FIGS. 13A & 13B, respectively.

[0556] The transgene expression data and cell count data demonstrate that BP15TA and AP15 TB are the most potent candidates to have mbIL15+ TCR+ T cells with the highest level of TCR and mbIL15 expression. Viability data demonstrated that despite of the size of the tricistronic mbIL15+ TCR vectors (Groups 7-14), the viability is similar to the two-vector co-transfection system (Groups 5 & 6).

[0557] Functionality of the TCR-T cells was also measured following first phase expansion (Day 13) as described below.

[0558] Activation of TCR-T cells generated by electroporation with different polycistronic plasmids was assessed. After 13 days of first phase expansion, cells were co-cultured with wild-type or mutant neoantigen peptide pulsed T2 cells. After overnight incubation, cells were harvested and induction of 4-1BB molecule on CD3+CD8+ cells was detected with 4-1BB antibody. Results are shown in FIG. 14A-14B demonstrating that mbIL15/TCR T cells were highly avid and specific to the target neoantigen as measured by upregulation of 4-1BB co-stimulatory receptor with negligible recognition of wild type sequence. There was no significant difference in function between the mbIL15/TCR T cells generated using different polycistronic plasmids.

[0559] The level of phosphorylated STAT5 was also assessed for TCR-T cells electroporated with different polycistronic plasmids. After 13 days of first phase expansion, cells were washed and incubated in cytokine-free 50:50 media overnight to stabilize the phosphorylation of STAT5. Phosphorylation of STAT5 was detected the following day on CD3+ cells using pSTAT5 (pY694). Results are shown in FIG. 15 demonstrating that the expressed mbIL15 is functional. IL15 signaling was activated, inducing phosphorylation of STAT5 (downstream of IL15 receptor). Phosphorylation of STAT5 in mbIL15 TCR T cells generated with different polycistronic plasmids was not significantly different.

[0560] The level of apoptosis after 9 days of activation was assessed for TCR-T cells electroporated with different polycistronic plasmids. After 13 days of first phase expansion, cells were washed and activated with CD3/CD28 Dynabeads® (ThermoFisher) for 9 days. After activation, apoptosis of CD3+ TCR+ cells was monitored with Annexin V kits (Biolegend) and Live/Dead stain (Invitrogen). Results are shown in FIG. 16 demonstrating that expression of mbIL15 on CD3+ TCR+ cells inhibited AICD (activation-induced cell death). This inhibition of AICD was not significantly different between the different polycistronic plasmids tested, nor was it different from two-vector systems (APB+mbIL15 and BPA+mbIL15).

[0561] A second expansion phase was performed as described below and vector copy number (VCN) following the second expansion phase was assessed. Briefly, T cells from Groups 3-14 were isolated by MACS using mTCR antibodies. T cells from Groups 1-14 were then incubated with a second expansion media (50:50 media containing IL-21) and irradiated feeder cells and OKT3 antibody. Cells were fed regularly with cytokines. After 15 days second phase expansion, cells were harvested and VCN was detected using qPCR as average number of Sleeping Beauty transgene DNA copy per cell in a sample. Results are shown in Table E9 demonstrating that low levels of vector were detected in TCR T cells and mbIL15-TCR T cells after two rounds of expansion.

TABLE E9
Vector Copy Number (VCN) after second expansion phase.

| Group | Name | VCN |
|---|---|---|
| 2 | mbIL15 cells | 0.3 |
| 3 | APB cells | 0.4 |
| 4 | BPA cells | 1.4 |
| 5 | APB+15 cells | 2.6 |
| 6 | BPA+15 cells | 2.1 |
| 7 | APBT15 cells | 4.7 |
| 8 | ATBP15 cells | 4.5 |
| 9 | AP15TB cells | 5.3 |
| 10 | AT15PB cells | 3.9 |
| 11 | BPAT15 cells | 1.5 |
| 12 | BTAP15 cells | 2.1 |
| 13 | BP15TA cells | 2.3 |
| 14 | BT15PA cells | 2.9 |

[0562] Conclusion: The series of data described in this example illustrate that BP15TA and AP15 TB are the most potent candidates to generate mbIL15 TCR T cell with the highest level of TCR and mbIL15 expression. All tricistronic mbIL15/TCR plasmids tested resulted in acceptable VCN values. Furthermore, co-expression of mbIL15 with a transgenic TCR, reduces AICD following T cell activation.

### Example 5: Evaluation of Polycistronic TCR Constructs with Different Murine Constant Regions

[0563] This Example evaluates the effect of different murine constant regions on the TCR constructs described above in Examples 1-4.

[0564] Briefly, the amino acid sequences of the TCRα chain and TCRβ chain examined here are identical to the TCRα chain and TCRβ chain described in Examples 1-4 except that the constant region of each chain is not cysteine-substituted. Specifically, the TCRα chain was generated by fusing a human Vα region, including its N-terminal signal sequence (SEQ ID NO: 1006) with a glutamic acid at position 2, to a murine Cα region modified by substituting a leucine at amino acid position 112, an isoleucine at amino acid position 114, and a valine at amino acid position 115 (SEQ ID NO: 42). The TCRβ chain was generated by fusing a human Vβ region, including its N-terminal signal sequence (SEQ ID NO: 2006) with an alanine at position 2, to a murine wild-type Cβ (SEQ ID NO: 52). The constructs containing the cysteine-substituted constant domains, as described in Examples 1-3, are referred to below as the “S version” and the newly-generated constructs containing the non-cysteine-substituted constant domains are referred to below as the “N version”. A schematic of these constructs is provided in FIG. 17.

[0565] The unified plasmids “NU version” referred to below vary in the nucleotide sequence of the TCR constant regions compared to the “N version”. All “NU versions” contain the same nucleotide sequences encoding the TCR constant regions. However, the amino acid sequences of the TCR constant regions encoded by the “NU version” are identical to those of the “N version”. No other differences exist between the “N version” and “NU version.”

[0566] To generate the TCR-T cells described in this Example 5, the plasmids described above were electroporated into the enriched PBMCs. Briefly, cryopreserved PBMCs were thawed, resuspended in supplemented media, and incubated in a 37° C./5% CO₂ incubator for one hour. The PBMC test articles listed in Table E10 were then prepared.

TABLE E10
PBMC test articles.

| Group | Name | Description |
|---|---|---|
| 2.1 | NT cells | Non-transposed PBMCs |
| 2.2 | BPA cells | PBMCs transposed with Plasmid BPA |
| 2.3 | BPA-N cells | PBMCs transposed with N version of Plasmid BPA |
| 2.4 | AP15TB cells | PBMCs transposed with Plasmid AP15TB |
| 2.5 | BP15TA cells | PBMCs transposed with Plasmid BP15TA |
| 2.6 | AP15TB-N cells | PBMCs transposed with N version of Plasmid AP15TB |
| 2.7 | BP15TA-N cells | PBMCs transposed with N version of Plasmid BP15TA |
| 2.8 | AP15TB-NU cells | PBMCs transposed with unified N version of Plasmid AP15TB |
| 2.9 | BP15TA-NU cells | PBMCs transposed with unified N version of Plasmid BP15TB |

[0567] Test articles were prepared as follows:

[0568] Group 2.1: Rested cells were harvested, spun down, resuspended in recovery media (50:50 media containing IL-7+IL-15+n-acetylcysteine (NAC)), and incubated in a 37° C./5% CO₂ incubator overnight.

[0569] Groups 2.2-2.9: Rested cells were harvested, spun down, resuspended in electroporation buffer together with the plasmids listed in Table E10, and electroporated. Following electroporation, cell suspensions were collected, transferred to recovery media (50:50 media containing IL-7+IL-15+NAC), and incubated in a 37° C./5% CO₂ incubator overnight.

[0570] Within 24 hours post-electroporation (Day 1), live cells were transferred to G-REX® culture plates (Wilson Wolf Manufacturing) and incubated with a first expansion media (50:50 media containing IL-21+IL-7+IL-12 and T Cell TransACT™). Cells were regularly fed with cytokines. After 11 days of first phase expansion, TCR+ cells were isolated with mTCR antibody. The isolated TCR+ T cells were transferred to G-REX® culture plates (Wilson Wolf Manufacturing) and incubated with a second expansion media (50:50 media containing 3000 IU/ml of IL-2 and T Cell TransACT™). Cells were fed regularly with cytokines. After 11 days of second phase expansion, cells were harvested, and the various assays described below were performed.

[0571] Transgene expression was assessed for T cells electroporated with different polycistronic plasmids. On Day 1 (post-transduction), Day 11 (post-1^{st} phase expansion) and Day 22 (post-2^{nd} phase expansion), cells were harvested and the expression of mTCR and mbIL15 was detected on CD3+ gated population with mouse TCR beta antibody and IL-15Rα antibody.

[0572] Fold expansion of total cell count and mTCR+ cell count was assessed for T cells electroporated with different polycistronic plasmids. Fold expansion value was calculated as: Cell number on Day 11/Cell number on Day 1 and Cell number on Day 22/Cell number on Day 11. Cells transposed with mbIL15/TCR tricistronic plasmids tended to expand less than cells transposed with TCR only bicistronic plasmids during both first and second phase expansion. However, significant degrees of expansion were achieved in all groups and no difference was seen between the different versions of the polycistronic plasmids. mTCR+ cell number was calculated as: Total cell number×CD3 population (%)×mTCR population (%).

[0573] The above transgene expression and cell growth data demonstrate that cells generated using N version and NU versions of the polycistronic plasmids were not phenotypically different from cells generated using the S version of the polycistronic plasmids.

[0574] Memory phenotype was assessed by multicolor flow cytometry for TCR-T cells electroporated with different polycistronic vectors. 2×10⁵ live TCR-T cells were used for multicolor flow cytometry assay. Graphs are sets of 2-parameter flow dot plots showing the expression of the T cell markers CD62L and CD45RO from one Donor at day 22 post-expansion. T cell memory subsets are defined as: CD62L+CD45RO+=central memory (Tcm); CD62L-CD45RO+=effector memory (Tem). Memory phenotype data at day 22 demonstrated that memory phenotype is not different between TCR only groups and mbIL15 TCR groups and is not different depending on which version of vector is used (S version vs. N version or NU version).

[0575] To carry out the pSTAT5 assay, the 4-1BB induction assay, and IFN-γ assay described below, the second expansion phase was extended to 16 days (due to the logistic load). Phosphorylation of STAT5 in T cells at Day 27 was detected on CD3+ cells with pSTAT5 (pY694). The pSTAT5 data shown in FIG. 18 demonstrated that the expressed mbIL15 is functional. IL15 signaling was activated, inducing phosphorylation of STAT5 (downstream of IL15 receptor). Phosphorylation of STAT5 in mbIL15 TCR-T cells generated with the different versions of polycistronic plasmids was not significantly different.

[0576] To assess activation of the generated TCR-T cells, overnight co-culture of the generated TCR-T cells with wild-type or mutant neoantigen pulsed DCs (HLA matched) was performed after 16 days second phase expansion and 4-1BB induction and IFN-γ secretion were measured. Induction of 4-1BB on CD3+CD8+ cells was detected with 4-1BB antibody. Secretion of IFN-γ measured with the ELISA antibody pair. The 4-1BB induction results shown in FIG. 19A, and IFN-γ secretion results shown in FIG. 19B demonstrate that the function of mbIL15 TCR T-cells generated with different versions of the polycistronic plasmids was not significantly different.

[0577] The long-term withdrawal (LTWD) assay was performed to examine the transgene expression, survival and activation of T cells cultured under cytokine-free conditions. The LTWD assay was performed as follows. The engineered T cells at Day 22 (post first phase and second phase expansion) were transferred to T25 flask and cultured for 4 weeks in cytokine-free media (50:50). 50% of media was exchanged every week. For the control groups (groups 2.2 & 2.3), cells were treated with 300 U/ml IL-2 twice a week while exchanging the 50% of media. Flow data were acquired using an NovoCyte Quanteon flow cytometer system (Agilent) and analyzed with FlowJo software (version 10.7.1; TreeStar, Ashland, OR). (Data n=4, pooled from 2 independent experiments)

[0578] After 4 weeks LTWD incubation, the expression of mTCR was detected on CD3+ gated population with mouse TCR beta antibody (FIG. 20A) and cell count and viability were accessed (FIG. 20B). This mTCR expression and cell count data demonstrated no significant difference between mbIL15 TCR-T cells generated with different versions of the polycistronic plasmids. The number of viable cells decreased after long-term cytokine withdrawal in all groups, but cells from the groups co-expressing mbIL15 and TCR survived 5-6 fold more compared to cells from the TCR only groups.

[0579] The activation of TCR-T cells after LTWD culture was assessed by 4-1BB induction and IFN-γ secretion after overnight co-culture with wild-type or mutant neoantigen (10 μg/ml) pulsed DCs (HLA matched). As described above, induction of 4-1BB on CD3+CD8+ cells was detected with 4-1BB antibody (FIG. 21A-21B) and IFN-7 secretion was measured with the ELISA antibody pair (FIG. 22A-22B). These data demonstrate that mbIL15 TCR-T cells which survived LTWD culture are still functional and were more strongly activated than cells from TCR only groups, but the function of mbIL15 TCR T-cells generated with different versions of the polycistronic plasmids was not significantly different.

[0580] Memory phenotype of TCR-T cells electroporated with different polycistronic vectors was also assessed. T cell memory subsets are defined as: CD45RA+CD45RO+CD62L+CD95+=stem cell memory-like (Tscm-like); CD45RA+CD45RO-CD62L+CD95+=stem cell memory (Tscm); CD45RA-CD45RO+CD62L+CD95+=central memory (Tcm); CD45RA-CD45RO+CD62L-CD95+=effector memory (Tem). T cell effector (Teff) are defined as CD45RA+CD45RO+CD62L-CD95+. The pie charts in FIG. 23A-23C show the mean frequency of live CD3⁺ T cell memory and effector subsets at day 11 post-expansion (FIG. 23A), day 22 post-expansion (FIG. 23B), and after 4 weeks of LTWD culture (FIG. 23C) in cells transposed with the tested plasmids.

[0581] Memory phenotype data shows the kinetics of TCR-T memory and effector differentiation. At days 11 and 22 post-expansion, there is no difference between the different polycistronic TCR plasmids. After 4 weeks of culture in presence of IL-2, TCR-T cells predominantly differentiated into Teff cells (over 85%). TCR-T cells expressing mbIL15 cultured for 4 weeks in the absence of cytokines differentiated into 3 main subsets: Teff, Tscm-like and Tscm cells. These results suggest that mbIL15 is sufficient to guide T cell differentiation to the Tscm phenotype.

[0582] Conclusions: The mbIL15 T cells generated from different versions of the polycistronic plasmids showed comparable features including TCR expression, memory phenotype, specificity, and IFN-γ secretion. This data supports that removal of cysteine-substitutions in the mouse constant domains used in the first-generation vectors and use of unified mouse constant regions will not produce any significant changes in the mbIL15 TCR T-cell product.

### Example 6: Generation and Evaluation of T Cells Generated Using Various Tricistronic TCR/mbIL15 Vectors

[0583] This Example describes the evaluation of T cells expressing mbIL15 in combination with different TCRα/TCRβ chains generated using tricistronic vectors as described below. Similar to the vectors described in Example 5, the tricistronic expression cassettes used in this Example each include a transcriptional regulatory element operably linked to a polycistronic polynucleotide that encodes a TCR α chain (referred to herein as “TCRα” or “A”), a TCR β chain (referred to herein as “TCRβ” or “B”), and membrane-bound IL-15/IL-15Rα fusion protein (referred to herein as “mbIL15” or “15”), each separated by a furin recognition site and either a P2A element or a T2A element that mediates ribosome skipping to enable expression of separate polypeptide chains.

[0584] The nine TCRs used in this Example are each directed against a different target as shown in Table E11. The Vα amino acid sequences and Vβ amino acid sequences for each of the nine TCRs listed correspond to the sequences provided in Table 6. Each TCR α chain was generated by fusing the Vα sequence to a murine Cα region modified by substituting a leucine at amino acid position 112, an isoleucine at amino acid position 114, and a valine at amino acid position 115 (SEQ ID NO: 42). Each TCRβ chain was generated by fusing the Vβ sequence to a murine wild-type Cβ (SEQ ID NO: 52).

TABLE E11
TCR Targets.

| Target Protein | Mutation | HLA Type | TCR |
|---|---|---|---|
| TP53 | R175H | A*02:01 | TCR001 |
| | | DRB1*13:01 | TCR009 |
| | R248W | A*68:01 | TCR057 |
| | Y220C | DRB3*02:02 | TCR016 |
| KRAS | G12D | A*11:01 | TCR022 |
| | | C*08:02 | TCR064 |
| | G12V | A*11:01 | TCR075 |
| | | C*01:02 | TCR055 |
| EGFR | E746-A750del | DPA1*02:01/DPB1*01:01 | TCR077 |

[0585] For each of the TCRs above, three vectors were constructed and evaluated: 1) TCR only (BA); 2) A15B; and 3) B15A. The TCR only (BA) vectors contain a bicistronic expression cassette encoding TCR β chain and TCR α chain separated by a furin recognition site and a P2A element in the following orientation from 5′ to 3′: TCRβ-TCRα. The A15B vectors contain a tricistronic expression cassette encoding TCR α chain, TCR β chain, and mbIL15 in the following orientation from 5′ to 3′: TCRα-mbIL15-TCRβ. The B15A vectors contain a tricistronic expression cassette encoding TCR α chain, TCR β chain, and mbIL15 in the following orientation from 5′ to 3′: TCRβ-mbIL15-TCRα.

[0586] TCR-T cells described in this Example were generated similarly to those described in Examples 2-5 except as indicated below.

[0587] Briefly, cryopreserved PBMCs were thawed, resuspended in supplemented media, and incubated in a 37° C./5% CO₂ incubator for one hour.

[0588] Test articles as listed in Table E12 were then prepared.

TABLE E12
PBMC test articles.

| Group | TCR | Name | Description |
|---|---|---|---|
| 3.1 | None | NT | Non-transposed PBMCs |
| 3.2 | TCR001 | BPA-N¹ | PBMCs transposed with TCR001 BPA-N |
| 3.3 | TCR001 | AP15TB-NU² | PBMCs transposed with TCR001 AP15TB-NU |
| 3.4 | TCR001 | BP15TA-NU³ | PBMCs transposed with TCR001 BP15TA-NU |
| 3.5 | TCR057 | BPA-N | PBMCs transposed with TCR057 BPA-N |
| 3.6 | TCR057 | AP15TB-NU | PBMCs transposed with TCR057 AP15TB-NU |
| 3.7 | TCR057 | BP15TA-NU | PBMCs transposed with TCR057 BP15TA-NU |
| 3.8 | TCR009 | BPA-N | PBMCs transposed with TCR009 BPA-N |
| 3.9 | TCR009 | AP15TB-NU | PBMCs transposed with TCR009 AP15TB-NU |
| 3.10 | TCR009 | BP15TA-NU | PBMCs transposed with TCR009 BP15TA-NU |
| 3.11 | TCR016 | BPA-N | PBMCs transposed with TCR016 BPA-N |
| 3.12 | TCR016 | AP15TB-NU | PBMCs transposed with TCR016 AP15TB-NU |
| 3.13 | TCR016 | BP15TA-NU | PBMCs transposed with TCR016 BP15TA-NU |
| 3.14 | None | NT | Non-transposed PBMCs |
| 3.15 | TCR022 | BPA-N | PBMCs transposed with TCR022 BPA-N |
| 3.16 | TCR022 | AP15TB-NU | PBMCs transposed with TCR022 AP15TB-NU |
| 3.17 | TCR022 | BP15TA-NU | PBMCs transposed with TCR022 BP15TA-NU |
| 3.18 | TCR075 | BPA-N | PBMCs transposed with TCR075 BPA-N |
| 3.19 | TCR075 | AP15TB-NU | PBMCs transposed with TCR075 AP15TB-NU |
| 3.20 | TCR075 | BP15TA-NU | PBMCs transposed with TCR075 BP15TA-NU |
| 3.21 | TCR055 | BPA-N | PBMCs transposed with TCR055 BPA-N |
| 3.22 | TCR055 | AP15TB-NU | PBMCs transposed with TCR055 AP15TB-NU |
| 3.23 | TCR055 | BP15TA-NU | PBMCs transposed with TCR055 BP15TA-NU |
| 3.24 | TCR064 | BPA-N | PBMCs transposed with TCR064 BPA-N |
| 3.25 | TCR064 | AP15TB-NU | PBMCs transposed with TCR064 AP15TB-NU |
| 3.26 | TCR064 | BP15TA-NU | PBMCs transposed with TCR064 BP15TA-NU |
| 3.27 | None | NT | Non-transposed PBMCs |
| 3.28 | TCR077 | BPA-N | PBMCs transposed with TCR077 BPA-N |
| 3.29 | TCR077 | AP15TB-NU | PBMCs transposed with TCR077 AP15TB-NU |
| 3.30 | TCR077 | BP15TA-NU | PBMCs transposed with TCR077 BP15TA-NU |

¹Generated using the same plasmid as BPA-N group in Example 5.
²Generated using the same plasmid as AP15TB-NU group in Example 5.
³Generated using the same plasmid as BP15TA-NU group in Example 5.

[0589] Test articles were prepared in three batches (Batch 1=Groups 3.1-3.13; Batch 2=Groups 3.14-3.26; Batch 3=Groups 3.27-3.30) as follows:

[0590] Groups 3.1 3.14, & 3.27: Rested cells were harvested, spun down, resuspended in recovery media (50:50 media containing IL-7+IL-15+n-acetylcysteine (NAC)), and incubated in a 37° C./5% CO₂ incubator overnight.

[0591] Groups 3.2-3.13, 3.15-3.26, & 3.28-3.30: Rested cells were harvested, spun down, resuspended in electroporation buffer together with the plasmids listed in Table E11, and electroporated. Following electroporation, cell suspensions were collected, transferred to recovery media (50:50 media containing IL-7+IL-15+NAC), and incubated in a 37° C./5% CO₂ incubator overnight.

[0592] Within 24 hours post-electroporation (Day 1), live cells were transferred to G-REX® culture plates (Wilson Wolf Manufacturing and incubated with a first expansion media (50:50 media containing IL-21+IL-7+IL-12 and T Cell TransACT™). Cells were regularly fed with cytokines. After 11 days of first phase expansion, TCR+ cells were isolated with mTCR antibody. The isolated TCR+ T cells were transferred to G-REX® culture plates (Wilson Wolf Manufacturing) and incubated with a second expansion media (50:50 media containing 3000 U/ml of IL-2 and T Cell TransACT™) During this second expansion phase, cells were regularly fed with cytokines. After 11 days of second phase expansion, cells were harvested, and the various assays described below were performed.

[0593] Transgene expression was assessed for T cells electroporated with different polycistronic plasmids. On Day 1 (post-transduction), Day 11 (post-1^{st} phase expansion) and Day 22 (post-2^{nd} phase expansion), cells were harvested and the expression of mTCR and mbIL15 was detected on CD3+ gated population with mouse TCR beta antibody and IL-15Rα antibody. The results are shown in FIGS. 24-28.

[0594] Fold expansion of total cell count and mTCR+ cell count was assessed for T cells electroporated with different polycistronic plasmids. Fold expansion value was calculated as: Cell number on Day 11/Cell number on Day 1 and Cell number on Day 22/Cell number on Day 11. mTCR+ cell number was calculated as: Total cell number×CD3 population (%)×mTCR population (%). The results are shown in Table E13.

TABLE E13
Fold expansion of total cells and mTCR+ cell
count during first and second expansion phases.

| | | Fold Expansion (FE) | | | | | | | |
|---|---|---|---|---|---|---|---|---|---|
| | | Total Cell | | | | mTCR+ Cell | | | |
| | | First | | Second | | First | | Second | |
| | | expansion | | expansion | | expansion | | expansion | |
| Group | | Mean | SEM | Mean | SEM | Mean | SEM | Mean | SEM |
| 1 | TCR001-BPA-N | 83.86 | 19.60 | 121.97 | 11.81 | 6.11 | 2.09 | 171.56 | 9.57 |
| | TCR001-AP15TB-NU | 66.89 | 13.09 | 107.01 | 20.38 | 18.38 | 9.60 | 101.00 | 17.14 |
| | TCR001-BP15TA-NU | 62.93 | 17.70 | 108.50 | 20.15 | 19.04 | 7.72 | 104.08 | 16.79 |
| 2 | TCR057-BPA-N | 98.21 | 36.03 | 110.40 | 7.05 | 8.16 | 4.73 | 146.17 | 13.45 |
| | TCR057-AP15TB-NU | 58.90 | 16.21 | 107.38 | 16.76 | 17.34 | 9.77 | 104.42 | 16.05 |
| | TCR057-BP15TA-NU | 58.78 | 16.21 | 108.69 | 3.91 | 14.19 | 6.44 | 104.04 | 3.64 |
| 3 | TCR009-BPA-N | 104.97 | 30.03 | 142.34 | 25.63 | 11.62 | 4.92 | 154.58 | 28.38 |
| | TCR009-AP15TB-NU | 51.68 | 13.48 | 95.38 | 13.31 | 24.76 | 12.75 | 83.83 | 16.19 |
| | TCR009-BP15TA-NU | 49.99 | 4.70 | 75.43 | 10.92 | 7.03 | 3.49 | 77.03 | 17.45 |
| 4 | TCR016-BPA-N | 87.13 | 9.63 | 127.79 | 25.67 | 17.38 | 5.29 | 142.91 | 26.78 |
| | TCR016-AP15TB-NU | 61.46 | 12.58 | 95.42 | 16.34 | 26.02 | 18.67 | 82.78 | 10.34 |
| | TCR016-BP15TA-NU | 66.33 | 15.42 | 93.38 | 14.09 | 23.39 | 15.51 | 83.30 | 14.44 |
| 5 | TCR022-BPA-N | 85.99 | 6.51 | 169.56 | 16.12 | 8.39 | 1.15 | 202.20 | 37.63 |
| | TCR022-AP15TB-NU | 59.11 | 5.90 | 95.36 | 12.47 | 12.21 | 1.59 | 102.12 | 22.10 |
| | TCR022-BP15TA-NU | 63.98 | 5.28 | 120.10 | 17.30 | 11.70 | 1.79 | 161.60 | 69.66 |
| 6 | TCR075-BPA-N | 89.45 | 6.14 | 182.86 | 15.27 | 9.12 | 0.75 | 207.74 | 21.54 |
| | TCR075-AP15TB-NU | 63.30 | 7.06 | 106.07 | 14.15 | 12.71 | 2.11 | 102.37 | 32.40 |
| | TCR075-BP15TA-NU | 59.06 | 5.91 | 107.40 | 20.65 | 10.57 | 2.47 | 114.25 | 43.15 |
| 7 | TCR055-BPA-N | 78.21 | 3.52 | 165.43 | 25.40 | 6.05 | 1.34 | 198.11 | 98.27 |
| | TCR055-AP15TB-NU | 58.84 | 1.25 | 95.98 | 18.09 | 10.28 | 1.79 | 67.59 | 20.05 |
| | TCR055-BP15TA-NU | 59.15 | 6.69 | 87.57 | 13.96 | 8.76 | 2.03 | 78.66 | 25.73 |
| 8 | TCR064-BPA-N | 86.10 | 10.54 | 177.48 | 15.01 | 8.47 | 1.48 | 212.18 | 55.16 |
| | TCR064-AP15TB-NU | 55.46 | 5.95 | 120.98 | 12.99 | 12.61 | 1.78 | 162.44 | 67.74 |
| | TCR064-BP15TA-NU | 59.66 | 4.38 | 110.54 | 16.75 | 9.78 | 1.98 | 137.63 | 59.08 |
| 9 | TCR077-BPA-N | 91.68 | 6.43 | 217.14 | 17.84 | 12.72 | 5.26 | 332.66 | 29.27 |
| | TCR077-AP15TB-NU | 57.10 | 5.54 | 97.22 | 13.45 | 16.66 | 7.28 | 75.79 | 4.98 |
| | TCR077-BP15TA-NU | 63.14 | 3.27 | 94.38 | 19.73 | 13.41 | 3.60 | 75.86 | 14.16 |

[0595] Cells generated using the polycistronic plasmids containing different TCR sequences were not phenotypically different from each other as demonstrated by transgene expression and cell growth data.

[0596] To assess activation of the generated TCR T-cells, overnight co-culture of the generated TCR T-cells with wild-type or mutant neoantigen pulsed DCs (HLA matched) was performed after 16 days second phase expansion and 4-1BB induction and IFN-γ secretion were measured. Induction of 4-1BB on CD3+CD8+ cells was detected with 4-1BB antibody. Secretion of IFN-γ measured with the ELISA antibody pair. The 4-1BB induction results are shown in FIG. 29A-29I and IFN-γ secretion results are shown in FIG. 30A-30I. The results demonstrate that when challenged with their cognate neoantigen, mbIL-15 TCR-T cells were highly avid and specific to the target neoantigens as measured by upregulation of 4-1BB co-stimulatory receptor and secretion of IFN-γ with negligible recognition of wild type sequences.

[0597] All data from electroporation to the second expansion phase of TCR vetting demonstrated that tricistronic system, expressing TCRα, TCRβ and mbIL15 with one plasmid successfully generated mbIL15 TCR-T cells and the features of the generated mbIL15 TCR-T cells are comparable to TCR-T cells in terms of transgene expression, cell growth, and functional specificity (4-1BB induction and IFN-γ secretion).

[0598] Cytolytic activity of TCR-T cells was assessed for T cells electroporated with polycistronic plasmids encoding TCR001+/−mbIL15 generated as described above (overnight recovery+11 days first phase expansion+11 days second phase expansion) and then harvested and frozen on Day 22. On experimental day, frozen Day 22 TCR-T cells were thawed and recovered for 3 days in media containing 3000 U/ml of IL-2. Then, the recovered TCR-T cells were incubated with AU565 (Mut+HLA−) or Tyk-nu (Mut+HLA+) cells. After overnight incubation, the remaining T cells were extensively washed, and the extent of viable cells left in the culture after TCR-specific cytolysis was measured using the CellTiter Glo luminescence-based assay. The results are shown in FIG. 31.

[0599] Specific lysis was calculated from background subtracted values as:

$$= [ \frac{\begin{matrix}( “ Tumor \& TCR - T ” value - \\ ( “ TCR - T ” Value + Mean “ Tumor ” Value ) )\end{matrix}}{\begin{matrix}“ TCR - T ” Value - \\ ( “ TCR - T ” Value + Mean “ Tumor ” Value )\end{matrix}} ] \times 100$$

[0600] Cytolytic activity of TCR-T cells was also assessed for T cells electroporated with polycistronic plasmids encoding TCR022+/−mbIL15 or TCR075+/−mbIL15 generated as described above (overnight recovery+11 days first phase expansion+11 days expansion) and then harvested and frozen on Day 22. On experimental day, frozen Day 22 TCR-T cells were thawed and recovered for 3 days in media containing 3000 U/ml of IL-2. Meantime, Saos-2 cells were plated in 96 well plate. After overnight incubation, HLA 11:01 plasmid was transfected into the Saos-2 cells and on the following day, WT or MUT neoantigenic peptides (1 ug/ml) were loaded on the transfected Saos-2 cells for 2 hours. Then, the recovered TCR-T cells were incubated with the resulting Saos-2 cells overnight. After the overnight incubation, the remaining T cells were extensively washed, and the extent of viable cells left in the culture after TCR-specific cytolysis was measured using the CellTiter Glo luminescence-based assay. The results are shown in FIG. 32A-32B.

[0601] Specific lysis was calculated from background subtracted values as:

$$= [ \frac{\begin{matrix}( “ Peptide loaded tumor \& TCR - T ” value - \\ ( “ TCR - T ” Value + Mean “ Peptide loaded Tumor ” Value )\end{matrix}}{\begin{matrix}“ TCR - T ” Value - ( “ TCR - T ” Value - \\ Mean “ Peptide loaded tumor ” Value )\end{matrix}} ] \times$$

The cytolytic activity data demonstrated that mbIL15 TCR-T cells generated using the tricistronic system exhibited specific lytic activity against target tumor cells although the efficacy of these cells was less effective compared to that of TCR-T cells.

[0602] The long-term withdrawal (LTWD) assay was performed to examine the transgene expression, survival and activation of T cells cultured under cytokine-free conditions. The LTWD assay was performed as follows. The engineered T cells at Day 22 (post first phase and second phase expansion) were transferred to T25 flask and cultured for 4 weeks in cytokine-free media (50:50). 50% of media was exchanged every week. For the control TCR only (BA) groups, cells were treated with 300 U/ml IL-2 twice a week while exchanging the 50% of media. Flow data were acquired using an NovoCyte Quanteon flow cytometer system (Agilent) and analyzed with FlowJo software (version 10.7.1; TreeStar, Ashland, OR). (Data n=4, pooled from 2 independent experiments)

[0603] After 4 weeks LTWD incubation, the expression of mTCR was detected on CD3+ gated population with mouse TCR beta antibody (FIG. 33) and cell count and viability were accessed (FIG. 34A-34C). This mTCR expression and cell count data demonstrated no significant difference between mbIL15 TCR-T cells generated with the different polycistronic plasmids. The number of viable cells decreased after long-term cytokine withdrawal in all groups, but cells from the groups co-expressing mbIL15 and TCR survived 5-6 fold more compared to cells from the TCR only groups.

[0604] The activation of TCR-T cells after LTWD culture was assessed by 4-1BB induction and IFN-γ secretion after overnight co-culture with wild-type or mutant neoantigen pulsed DCs (HLA matched). As described above, induction of 4-1BB on CD3+CD8+ cells was detected with 4-1BB antibody (FIG. 35A-35C) and IFN-γ secretion was measured with the ELISA antibody pair (FIG. 36A-36C). A comparison of 4-1BB induction assessed for T cells harvested at Day 27 and after LTWD is shown in FIG. 37A-37C. These data demonstrate that mbIL15 TCR-T cells which survived LTWD culture are still functional and were more strongly activated than cells from TCR only groups. The data also demonstrate that after 4 week of cytokine withdrawal (LTWD), mbIL15 TCR-T cells showed even more potent induction of 4-1BB compared to those cells after the second expansion phase.

[0605] Memory phenotype of TCR-T cells electroporated with different polycistronic vectors was also assessed. T cell memory subsets are defined as: CD45RA+CD45RO+CD62L+CD95+=stem cell memory-like (Tscm-like); CD45RA+CD45RO-CD62L+CD95+=stem cell memory (Tscm); CD45RA-CD45RO+CD62L+CD95+=central memory (Tcm); CD45RA-CD45RO+CD62L-CD95+=effector memory (Tem). T cell effector (Teff) are defined as CD45RA+CD45RO+CD62L-CD95+. The data in Tables E14 and E15 and representative pie charts in FIGS. 38-40 show the mean frequency of live CD3⁺ T cell memory and effector subsets at day 11 post-expansion (Table E14 & FIG. 38), day 22 post-expansion (Table E15 & FIG. 39), and after 4 weeks of LTWD culture (FIGS. 40A-40E) in cells transposed with the tested plasmids.

TABLE E14
Memory phenotype of engineered T cells at D11.

| | | % Tscm- | % | % | % | % |
|---|---|---|---|---|---|---|
| Plasmid | | like | Tscm | Teff | Tcm | Tem |
| 1 | TCR001-BPA-N | 35.8 | 0.5 | 10.3 | 36.5 | 16.9 |
| | TCR001-AP15TB-NU | 34.1 | 0.2 | 7.3 | 43.3 | 15.1 |
| | TCR001-BP15TA-NU | 29.0 | nd | 6.7 | 46.9 | 17.2 |
| 2 | TCR057-BPA-N | 37.1 | 0.4 | 12.3 | 31.6 | 18.6 |
| | TCR057-AP15TB-NU | 33.7 | 0.1 | 7.7 | 43.5 | 15.0 |
| | TCR057-BP15TA-NU | 31.4 | 0.2 | 6.8 | 45.5 | 16.1 |
| 3 | TCR009-BPA-N | 38.3 | 0.6 | 11.8 | 29.9 | 19.4 |
| | TCR009-AP15TB-NU | 34.8 | 0.1 | 7.1 | 44.0 | 14.0 |
| | TCR009-BP15TA-NU | 28.5 | 0.2 | 6.3 | 47.7 | 17.3 |
| 4 | TCR016-BPA-N | 40.2 | 0.6 | 12.6 | 30.0 | 16.6 |
| | TCR016-AP15TB-NU | 32.8 | 0.4 | 6.8 | 44.8 | 15.2 |
| | TCR016-BP15TA-NU | 32.1 | 0.3 | 7.0 | 45.1 | 15.5 |
| 5 | TCR022-BPA-N | 58.1 | 2.9 | 7.5 | 25.6 | 5.9 |
| | TCR022-AP15TB-NU | 55.1 | 0.8 | 2.4 | 38.7 | 3.0 |
| | TCR022-BP15TA-NU | 56.9 | 0.7 | 2.3 | 37.4 | 2.7 |
| 6 | TCR075-BPA-N | 59.7 | 2.8 | 8.5 | 23.9 | 5.1 |
| | TCR075-AP15TB-NU | 53.5 | 0.7 | 2.1 | 40.6 | 3.1 |
| | TCR075-BP15TA-NU | 56.8 | 0.8 | 2.5 | 37.2 | 2.7 |
| 7 | TCR055-BPA-N | 55.6 | 2.5 | 8.2 | 27.8 | 5.9 |
| | TCR055-AP15TB-NU | 56.0 | 0.9 | 2.5 | 38.1 | 2.5 |
| | TCR055-BP15TA-NU | 56.6 | 0.8 | 2.5 | 37.3 | 2.8 |
| 8 | TCR064-BPA-N | 57.3 | 3.3 | 8.2 | 25.5 | 5.7 |
| | TCR064-AP15TB-NU | 53.3 | 0.8 | 2.5 | 40.1 | 3.3 |
| | TCR064-BP15TA-NU | 54.0 | 0.6 | 2.4 | 39.6 | 3.4 |
| 9 | TCR077-BPA-N | 63.8 | 3.0 | 5.3 | 22.0 | 5.8 |
| | TCR077-AP15TB-NU | 50.7 | 0.2 | 3.7 | 41.2 | 4.2 |
| | TCR077-BP15TA-NU | 50.7 | 0.2 | 4.3 | 40.4 | 4.4 |

TABLE E15
Memory phenotype of engineered T cells at D22.

| | | % Tscm- | % | % | % | % |
|---|---|---|---|---|---|---|
| Plasmid | | like | Tscm | Teff | Tcm | Tem |
| 1 | TCR001-BPA-N | 28.8 | 0.2 | 23.0 | 22.8 | 25.2 |
| | TCR001-AP15TB-NU | 33.6 | 0.9 | 29.8 | 15.3 | 20.4 |
| | TCR001-BP15TA-NU | 31.2 | 0.7 | 28.4 | 16.9 | 22.8 |
| 2 | TCR057-BPA-N | 31.2 | 0.2 | 22.7 | 23.1 | 22.8 |
| | TCR057-AP15TB-NU | 33.5 | 0.4 | 28.1 | 18.0 | 20.0 |
| | TCR057-BP15TA-NU | 34.4 | 0.7 | 28.5 | 16.5 | 19.9 |
| 3 | TCR009-BPA-N | 26.3 | 0.1 | 19.0 | 27.7 | 26.9 |
| | TCR009-AP15TB-NU | 34.7 | 0.2 | 29.4 | 15.3 | 19.4 |
| | TCR009-BP15TA-NU | 27.5 | 0.8 | 32.9 | 12.7 | 26.1 |
| 4 | TCR016-BPA-N | 30.7 | 0.1 | 22.1 | 23.3 | 23.8 |
| | TCR016-AP15TB-NU | 35.3 | 0.8 | 29.6 | 14.1 | 20.2 |
| | TCR016-BP15TA-NU | 33.4 | 0.8 | 28.9 | 14.7 | 22.2 |
| 5 | TCR022-BPA-N | 28.7 | 0.1 | 15.3 | 31.8 | 24.1 |
| | TCR022-AP15TB-NU | 32.3 | 0.7 | 22.1 | 25.1 | 19.8 |
| | TCR022-BP15TA-NU | 30.4 | 0.5 | 22.8 | 24.1 | 22.2 |
| 6 | TCR075-BPA-N | 26.9 | 0.2 | 15.6 | 33.4 | 23.9 |
| | TCR075-AP15TB-NU | 31.7 | 0.7 | 22.6 | 22.3 | 22.7 |
| | TCR075-BP15TA-NU | 31.4 | 0.5 | 23.9 | 22.2 | 22.0 |
| 7 | TCR055-BPA-N | 22.9 | 0.2 | 14.9 | 35.1 | 26.9 |
| | TCR055-AP15TB-NU | 28.8 | 0.5 | 27.5 | 19.7 | 23.5 |
| | TCR055-BP15TA-NU | 28.8 | 0.4 | 25.7 | 20.2 | 24.9 |
| 8 | TCR064-BPA-N | 24.1 | 0.1 | 13.9 | 34.3 | 27.6 |
| | TCR064-AP15TB-NU | 28.7 | 0.3 | 21.1 | 25.8 | 24.1 |
| | TCR064-BP15TA-NU | 28.8 | 0.6 | 22.5 | 23.6 | 24.5 |
| 9 | TCR077-BPA-N | 34.3 | 0.3 | 27.8 | 19.2 | 18.4 |
| | TCR077-AP15TB-NU | 37.8 | 2.2 | 34.8 | 10.7 | 14.6 |
| | TCR077-BP15TA-NU | 37.8 | 1.9 | 36.4 | 10.1 | 13.8 |

[0606] Memory phenotype data shows the kinetics of TCR-T memory and effector differentiation. The addition of mbIL15 to TCR-T cells resulted in changes to the memory phenotype in the expanded product to contain fewer central memory cells (Tcm) and more effector (Teff) and stem cell memory (Tscm) populations relative to conventional TCR-T cells. After 4 weeks of culture in presence of IL-2, TCR-T cells predominantly differentiated into Teff cells. TCR-T cells expressing mbIL15 cultured for 4 weeks in the absence of cytokines differentiated into 3 main subsets: Teff, Tscm-like and Tscm cells. These results suggest that mbIL15 is sufficient to guide T cell differentiation to the Tscm phenotype.

[0607] Conclusions: mbIL15 TCR-T cells were successfully generated using 18 different constructs (2 different orientations; AP15 TB and BP15TA×9 TCRs). The addition of mbIL15 to TCR-T cells resulted in changes to the memory phenotype in the expanded product to contain fewer central memory cells (Tcm) and more effector (Teff) and stem cell memory (Tscm) populations relative to conventional TCR-T cells. Furthermore, long-term withdrawal of cytokine support (LTWD) demonstrated survival of a fraction of mbIL15 TCR-T cells which was significantly higher than survival of TCR-T cells lacking mbIL15. Functional and phenotypic evaluation of the persistent mbIL15 TCR-T cells revealed that they retained their functional neoantigen specificity and potency while displaying a preponderance of Tscm TCR-T cells capable of regenerating TCR-T cell effector pools. This suggested that mbIL15 TCR-T cells could likely establish long-lived tumor-specific TCR-T cells that potentially overcome suppression by the tumor microenvironment or other negative regulators. This non-clinical data supports clinical application of mbIL15 TCR-T cell platform and provides evidence that this strategy could result in improved efficacy for cancer treatment.

[0608] The invention is not to be limited in scope by the specific embodiments described herein. Indeed, various modifications of the invention in addition to those described will become apparent to those skilled in the art from the foregoing description and accompanying figures. Such modifications are intended to fall within the scope of the appended claims.

[0609] All references (e.g., publications or patents or patent applications) cited herein are incorporated herein by reference in their entireties and for all purposes to the same extent as if each individual reference (e.g., publication or patent or patent application) was specifically and individually indicated to be incorporated by reference in its entirety for all purposes.

[0610] Other embodiments are within the following claims.

The application's sequence listing, which the Patent Office published only in electronic form, follows.

SEQUENCE LISTING (2800 sequences)

SEQ ID NO: 1 - skipped

SEQ ID NO: 2 - protein, 4 aa, synthetic construct
RAKR

SEQ ID NO: 3 - DNA, 12 bp, synthetic construct
  source 1..12: mol_type = other DNA
cgggcgaaacgc

SEQ ID NO: 4 - protein, 8 aa, synthetic construct
RAKRSGSG

SEQ ID NO: 5 - DNA, 24 bp, synthetic construct
  source 1..24: mol_type = other DNA
cgggcgaaacgctctggaagcgga

SEQ ID NO: 6-9 - skipped (4 entries)

SEQ ID NO: 10 - protein, 27 aa, synthetic construct
RAKRSGSGATNFSLLKQAGDVEENPGP

SEQ ID NO: 11 - DNA, 81 bp, synthetic construct
  source 1..81: mol_type = other DNA
cgggcgaaacgctctggaagcggagcgaccaatttcagcctgctgaagcaggcgggcgatgtggaggagaaccctggccca

SEQ ID NO: 12 - protein, 26 aa, synthetic construct
RAKRSGSGEGRGSLLTCGDVEENPGP

SEQ ID NO: 13 - DNA, 78 bp, synthetic construct
  source 1..78: mol_type = other DNA
cgggcgaaacgctctggaagcggagagggcagaggaagtcttctaacatgcggtgacgtggaggagaatcccggccct

SEQ ID NO: 14 - protein, 30 aa, synthetic construct
RAKRSGSGVKQTLNFDLLKLAGDVESNPGP

SEQ ID NO: 15 - DNA, 90 bp, synthetic construct
  source 1..90: mol_type = other DNA
cgggcgaaacgctctggaagcggagtgaagcagaccctgaatttcgacctgctgaagctggccggggacgtggagagcaaccctggcccc

SEQ ID NO: 16 - protein, 28 aa, synthetic construct
RAKRSGSGQCTNYALLKLAGDVESNPGP

SEQ ID NO: 17 - DNA, 84 bp, synthetic construct
  source 1..84: mol_type = other DNA
cgggcgaaacgctctggaagcggacagtgtactaattatgctctcttgaaattggctggagatgttgagagcaacccaggtccc

SEQ ID NO: 18 - protein, 19 aa, synthetic construct
ATNFSLLKQAGDVEENPGP

SEQ ID NO: 19 - DNA, 57 bp, synthetic construct
  source 1..57: mol_type = other DNA
gcgaccaatttcagcctgctgaagcaggcgggcgatgtggaggagaaccctggccca

SEQ ID NO: 20 - protein, 22 aa, synthetic construct
GSGATNFSLLKQAGDVEENPGP

SEQ ID NO: 21 - DNA, 66 bp, synthetic construct
  source 1..66: mol_type = other DNA
ggctccggagcgaccaatttcagcctgctgaagcaggcgggcgatgtggaggagaaccctggccca

SEQ ID NO: 22 - protein, 18 aa, synthetic construct
EGRGSLLTCGDVEENPGP

SEQ ID NO: 23 - DNA, 54 bp, synthetic construct
  source 1..54: mol_type = other DNA
gagggcagaggaagtcttctaacatgcggtgacgtggaggagaatcccggccct

SEQ ID NO: 24 - protein, 21 aa, synthetic construct
GSGEGRGSLLTCGDVEENPGP

SEQ ID NO: 25 - DNA, 63 bp, synthetic construct
  source 1..63: mol_type = other DNA
ggctccggagagggcagaggaagtcttctaacatgcggtgacgtggaggagaatcccggccct

SEQ ID NO: 26 - protein, 22 aa, synthetic construct
VKQTLNFDLLKLAGDVESNPGP

SEQ ID NO: 27 - DNA, 66 bp, synthetic construct
  source 1..66: mol_type = other DNA
gtgaagcagaccctgaatttcgacctgctgaagctggccggggacgtggagagcaaccctggcccc

SEQ ID NO: 28 - protein, 25 aa, synthetic construct
GSGVKQTLNFDLLKLAGDVESNPGP

SEQ ID NO: 29 - DNA, 75 bp, synthetic construct
  source 1..75: mol_type = other DNA
ggctccggagtgaagcagaccctgaatttcgacctgctgaagctggccggggacgtggagagcaaccctggcccc

SEQ ID NO: 30 - protein, 20 aa, synthetic construct
QCTNYALLKLAGDVESNPGP

SEQ ID NO: 31 - DNA, 60 bp, synthetic construct
  source 1..60: mol_type = other DNA
cagtgtactaattatgctctcttgaaattggctggagatgttgagagcaacccaggtccc

SEQ ID NO: 32 - protein, 23 aa, synthetic construct
GSGQCTNYALLKLAGDVESNPGP

SEQ ID NO: 33 - DNA, 69 bp, synthetic construct
  source 1..69: mol_type = other DNA
ggctccggacagtgtactaattatgctctcttgaaattggctggagatgttgagagcaacccaggtccc

SEQ ID NO: 34-39 - skipped (6 entries)

SEQ ID NO: 40 - protein, 137 aa, synthetic construct
  VARIANT 1: note = X can be N,D,H or Y
  VARIANT 48: note = X can be T or C
  VARIANT 112: note = X can be S,A,V,L,I,P,F,M or W
  VARIANT 114: note = X can be M,A,V,L,I,P,F or W
  VARIANT 115: note = X can be G,A,V,L,I,P,F,M or W
XIQNPEPAVYQLKDPRSQDSTLCLFTDFDSQINVPKTMESGTFITDKXVLDMKAMDSKSNGAIAWSNQTSFTCQDIFKETNATYPSSDVPCDATLTEKSFETDMNLNFQNLXVXXLRILLLKVAGFNLLMTLRLWSS

SEQ ID NO: 41 - protein, 137 aa, synthetic construct
NIQNPEPAVYQLKDPRSQDSTLCLFTDFDSQINVPKTMESGTFITDKCVLDMKAMDSKSNGAIAWSNQTSFTCQDIFKETNATYPSSDVPCDATLTEKSFETDMNLNFQNLLVIVLRILLLKVAGFNLLMTLRLWSS

SEQ ID NO: 42 - protein, 137 aa, synthetic construct
NIQNPEPAVYQLKDPRSQDSTLCLFTDFDSQINVPKTMESGTFITDKTVLDMKAMDSKSNGAIAWSNQTSFTCQDIFKETNATYPSSDVPCDATLTEKSFETDMNLNFQNLLVIVLRILLLKVAGFNLLMTLRLWSS

SEQ ID NO: 43 - protein, 137 aa, synthetic construct
NIQNPEPAVYQLKDPRSQDSTLCLFTDFDSQINVPKTMESGTFITDKCVLDMKAMDSKSNGAIAWSNQTSFTCQDIFKETNATYPSSDVPCDATLTEKSFETDMNLNFQNLSVMGLRILLLKVAGFNLLMTLRLWSS

SEQ ID NO: 44 - protein, 137 aa, synthetic construct
NIQNPEPAVYQLKDPRSQDSTLCLFTDFDSQINVPKTMESGTFITDKTVLDMKAMDSKSNGAIAWSNQTSFTCQDIFKETNATYPSSDVPCDATLTEKSFETDMNLNFQNLSVMGLRILLLKVAGFNLLMTLRLWSS

SEQ ID NO: 45 - protein, 141 aa, synthetic construct
  VARIANT 1: note = X can be N,D,H or Y
  VARIANT 48: note = X can be T or C
  VARIANT 116: note = X can be S,A,V,L,I,P,F,M or W
  VARIANT 118: note = X can be M,A,V,L,I,P,F or W
  VARIANT 119: note = X can be G,A,V,L,I,P,F,M or W
XIQNPDPAVYQLRDSKSSDKSVCLFTDFDSQTNVSQSKDSDVYITDKXVLDMRSMDFKSNSAVAWSNKSDFACANAFNNSIIPEDTFFPSPESSCDVKLVEKSFETDTNLNFQNLXVXXFRILLLKVAGFNLLMTLRLWSS

SEQ ID NO: 46 - protein, 141 aa, synthetic construct
  VARIANT 1: note = X can be N,D,H or Y
XIQNPDPAVYQLRDSKSSDKSVCLFTDFDSQTNVSQSKDSDVYITDKCVLDMRSMDFKSNSAVAWSNKSDFACANAFNNSIIPEDTFFPSPESSCDVKLVEKSFETDTNLNFQNLLVIVFRILLLKVAGFNLLMTLRLWSS

SEQ ID NO: 47 - protein, 141 aa, synthetic construct
  VARIANT 1: note = X can be N,D,H or Y
XIQNPDPAVYQLRDSKSSDKSVCLFTDFDSQTNVSQSKDSDVYITDKTVLDMRSMDFKSNSAVAWSNKSDFACANAFNNSIIPEDTFFPSPESSCDVKLVEKSFETDTNLNFQNLLVIVFRILLLKVAGFNLLMTLRLWSS

SEQ ID NO: 48 - protein, 141 aa, synthetic construct
  VARIANT 1: note = X can be N,D,H or Y
XIQNPDPAVYQLRDSKSSDKSVCLFTDFDSQTNVSQSKDSDVYITDKCVLDMRSMDFKSNSAVAWSNKSDFACANAFNNSIIPEDTFFPSPESSCDVKLVEKSFETDTNLNFQNLSVIGFRILLLKVAGFNLLMTLRLWSS

SEQ ID NO: 49 - protein, 141 aa, synthetic construct
  VARIANT 1: note = X can be N,D,H or Y
XIQNPDPAVYQLRDSKSSDKSVCLFTDFDSQTNVSQSKDSDVYITDKTVLDMRSMDFKSNSAVAWSNKSDFACANAFNNSIIPEDTFFPSPESSCDVKLVEKSFETDTNLNFQNLSVIGFRILLLKVAGFNLLMTLRLWSS

SEQ ID NO: 50 - protein, 173 aa, synthetic construct
  VARIANT 57: note = X can be S or C
EDLRNVTPPKVSLFEPSKAEIANKQKATLVCLARGFFPDHVELSWWVNGKEVHSGVXTDPQAYKESNYSYCLSSRLRVSATFWHNPRNHFRCQVQFHGLSEEDKWPEGSPKPVTQNISAEAWGRADCGITSASYQQGVLSATILYEILLGKATLYAVLVSTLVVMAMVKRKNS

SEQ ID NO: 51 - protein, 173 aa, synthetic construct
EDLRNVTPPKVSLFEPSKAEIANKQKATLVCLARGFFPDHVELSWWVNGKEVHSGVCTDPQAYKESNYSYCLSSRLRVSATFWHNPRNHFRCQVQFHGLSEEDKWPEGSPKPVTQNISAEAWGRADCGITSASYQQGVLSATILYEILLGKATLYAVLVSTLVVMAMVKRKNS

SEQ ID NO: 52 - protein, 173 aa, synthetic construct
EDLRNVTPPKVSLFEPSKAEIANKQKATLVCLARGFFPDHVELSWWVNGKEVHSGVSTDPQAYKESNYSYCLSSRLRVSATFWHNPRNHFRCQVQFHGLSEEDKWPEGSPKPVTQNISAEAWGRADCGITSASYQQGVLSATILYEILLGKATLYAVLVSTLVVMAMVKRKNS

SEQ ID NO: 53 - protein, 179 aa, synthetic construct
  VARIANT 57: note = X can be S or C
EDLKNVFPPEVAVFEPSEAEISHTQKATLVCLATGFYPDHVELSWWVNGKEVHSGVXTDPQPLKEQPALNDSRYCLSSRLRVSATFWQNPRNHFRCQVQFYGLSENDEWTQDRAKPVTQIVSAEAWGRADCGFTSESYQQGVLSATILYEILLGKATLYAVLVSALVLMAMVKRKDSRG

SEQ ID NO: 54 - protein, 179 aa, synthetic construct
EDLKNVFPPEVAVFEPSEAEISHTQKATLVCLATGFYPDHVELSWWVNGKEVHSGVCTDPQPLKEQPALNDSRYCLSSRLRVSATFWQNPRNHFRCQVQFYGLSENDEWTQDRAKPVTQIVSAEAWGRADCGFTSESYQQGVLSATILYEILLGKATLYAVLVSALVLMAMVKRKDSRG

SEQ ID NO: 55 - DNA, 411 bp, synthetic construct
  source 1..411: mol_type = other DNA
aacatccagaatcccgagcctgcggtgtaccagctgaaggacccccgctctcaggatagcacactgtgcctgttcaccgactttgatagccagatcaacgtgcctaaaacaatggagtccggcaccttcatcaccgacaagtgcgtgctggatatgaaagcgatggactccaagtctaacggcgcgatcgcgtggtccaatcagacatctttcacctgccaggatatcttcaaggagacaaacgcgacctatccttcctctgacgtgccatgtgatgcgacactgaccgagaagagcttcgagacagacatgaacctgaattttcagaatctgctggtcatcgtgctgagaatcctgctgctgaaggtggcgggctttaatctgctgatgacactgcggctgtggagttcc

SEQ ID NO: 56 - DNA, 519 bp, synthetic construct
  source 1..519: mol_type = other DNA
gaggacctgaggaacgtgaccccacctaaagtgagcctgttcgagccatccaaggcggagatcgcgaataagcagaaagcgaccctggtgtgcctggcgaggggcttctttcccgatcacgtggagctgtcctggtgggtgaacggcaaagaggtgcactctggcgtgtgcacagaccctcaggcgtacaaggagagcaattactcctattgtctgtctagcagactgagggtgagcgcgaccttttggcacaacccccggaatcacttccgctgccaggtgcagtttcacggcctgtccgaggaggataaatggcctgagggctctccaaagcccgtgacacagaatatcagcgcggaggcgtggggaagagcggactgtggcattacaagcgcgtcctatcagcagggcgtgctgtccgcgaccatcctgtacgagattctgctgggcaaggcgacactgtatgcggtgctggtgtccaccctggtggtcatggcgatggtgaagaggaaaaactct

SEQ ID NO: 57 - DNA, 411 bp, synthetic construct
  source 1..411: mol_type = other DNA
  misc_feature 1..3: note = NNN make up a codon that encodes Asn, Asp, His, or Tyr
  misc_feature 142..144: note = NNN make up a codon that encodes Thr or Cys
  misc_feature 334..336: note = NNN  make up a codon that encodes Ser, Ala, Val, Leu, Ile, Pro, Phe, Met, or Trp
  misc_feature 340..342: note = NNN  make up a codon that encodes Met, Ala, Val, Leu, Ile, Pro, Phe, or Trp
  misc_feature 343..345: note = NNN  make up a codon that encodes Gly, Ala, Val, Leu, Ile, Pro, Phe, Met, or Trp
nnnatccagaatcccgagcctgcggtgtaccagctgaaggacccccgctctcaggatagcacactgtgcctgttcaccgactttgatagccagatcaacgtgcctaaaacaatggagtccggcaccttcatcaccgacaagnnngtgctggatatgaaagcgatggactccaagtctaacggcgcgatcgcgtggtccaatcagacatctttcacctgccaggatatcttcaaggagacaaacgcgacctatccttcctctgacgtgccatgtgatgcgacactgaccgagaagagcttcgagacagacatgaacctgaattttcagaatctgnnngtcnnnnnnctgagaatcctgctgctgaaggtggcgggctttaatctgctgatgacactgcggctgtggagttcc

SEQ ID NO: 58 - DNA, 411 bp, synthetic construct
  source 1..411: mol_type = other DNA
aacatccagaatcccgagcctgcggtgtaccagctgaaggacccccgctctcaggatagcacactgtgcctgttcaccgactttgatagccagatcaacgtgcctaaaacaatggagtccggcaccttcatcaccgacaagaccgtgctggatatgaaagcgatggactccaagtctaacggcgcgatcgcgtggtccaatcagacatctttcacctgccaggatatcttcaaggagacaaacgcgacctatccttcctctgacgtgccatgtgatgcgacactgaccgagaagagcttcgagacagacatgaacctgaattttcagaatctgctggtcatcgtgctgagaatcctgctgctgaaggtggcgggctttaatctgctgatgacactgcggctgtggagttcc

SEQ ID NO: 59 - DNA, 519 bp, synthetic construct
  source 1..519: mol_type = other DNA
  misc_feature 169..171: note = NNN  make up a codon that encodes Ser or Cys
gaggacctgaggaacgtgaccccacctaaagtgagcctgttcgagccatccaaggcggagatcgcgaataagcagaaagcgaccctggtgtgcctggcgaggggcttctttcccgatcacgtggagctgtcctggtgggtgaacggcaaagaggtgcactctggcgtgnnnacagaccctcaggcgtacaaggagagcaattactcctattgtctgtctagcagactgagggtgagcgcgaccttttggcacaacccccggaatcacttccgctgccaggtgcagtttcacggcctgtccgaggaggataaatggcctgagggctctccaaagcccgtgacacagaatatcagcgcggaggcgtggggaagagcggactgtggcattacaagcgcgtcctatcagcagggcgtgctgtccgcgaccatcctgtacgagattctgctgggcaaggcgacactgtatgcggtgctggtgtccaccctggtggtcatggcgatggtgaagaggaaaaactct

SEQ ID NO: 60 - protein, 179 aa, synthetic construct
EDLKNVFPPEVAVFEPSEAEISHTQKATLVCLATGFYPDHVELSWWVNGKEVHSGVSTDPQPLKEQPALNDSRYCLSSRLRVSATFWQNPRNHFRCQVQFYGLSENDEWTQDRAKPVTQIVSAEAWGRADCGFTSESYQQGVLSATILYEILLGKATLYAVLVSALVLMAMVKRKDSRG

SEQ ID NO: 61-69 - skipped (9 entries)

SEQ ID NO: 70 - protein, 395 aa, synthetic construct [sequence omitted]

SEQ ID NO: 71 - DNA, 1185 bp, synthetic construct
  source 1..1185: mol_type = other DNA
atggattggacctggattctgtttctggtggccgctgccacaagagtgcacagcaactgggtgaatgtgatcagcgacctgaagaagatcgaggatctgatccagagcatgcacattgatgccaccctgtacacagaatctgatgtgcaccctagctgtaaagtgaccgccatgaagtgttttctgctggagctgcaggtgatttctctggaaagcggagatgcctctatccacgacacagtggagaatctgatcatcctggccaacaatagcctgagcagcaatggcaatgtgacagagtctggctgtaaggagtgtgaggagctggaggagaagaacatcaaggagtttctgcagagctttgtgcacatcgtgcagatgttcatcaatacaagctctggcggaggatctggaggaggcggatctggaggaggaggcagtggaggcggaggatctggcggaggatctctgcagattacatgccctcctccaatgtctgtggagcacgccgatatttgggtgaagtcctacagcctgtacagcagagagagatacatctgcaacagcggctttaagagaaaggccggcacctcttctctgacagagtgcgtgctgaataaggccacaaatgtggcccactggacaacacctagcctgaagtgcattagagatcctgccctggtccaccagaggcctgcccctccatctacagtgacaacagccggagtgacacctcagcctgaatctctgagcccttctggaaaagaacctgccgccagctctcctagctctaataataccgccgccacaacagccgccattgtgcctggatctcagctgatgcctagcaagtctcctagcacaggcacaacagagatcagcagccacgaatcttctcacggaacaccttctcagaccaccgccaagaattgggagctgacagcctctgcctctcaccagcctccaggagtgtatcctcagggccactctgatacaacagtggccatcagcacatctacagtgctgctgtgtggactgtctgccgtgtctctgctggcctgttacctgaagtctagacagacacctcctctggcctctgtggagatggaggccatggaagccctgcctgtgacatggggaacaagcagcagagatgaagacctggagaattgttctcaccacctg

SEQ ID NO: 72 - skipped

SEQ ID NO: 73 - protein, 377 aa, synthetic construct
NWVNVISDLKKIEDLIQSMHIDATLYTESDVHPSCKVTAMKCFLLELQVISLESGDASIHDTVENLIILANNSLSSNGNVTESGCKECEELEEKNIKEFLQSFVHIVQMFINTSSGGGSGGGGSGGGGSGGGGSGGGSLQITCPPPMSVEHADIWVKSYSLYSRERYICNSGFKRKAGTSSLTECVLNKATNVAHWTTPSLKCIRDPALVHQRPAPPSTVTTAGVTPQPESLSPSGKEPAASSPSSNNTAATTAAIVPGSQLMPSKSPSTGTTEISSHESSHGTPSQTTAKNWELTASASHQPPGVYPQGHSDTTVAISTSTVLLCGLSAVSLLACYLKSRQTPPLASVEMEAMEALPVTWGTSSRDEDLENCSHHL

SEQ ID NO: 74 - DNA, 1131 bp, synthetic construct
  source 1..1131: mol_type = other DNA
aactgggtgaatgtgatcagcgacctgaagaagatcgaggatctgatccagagcatgcacattgatgccaccctgtacacagaatctgatgtgcaccctagctgtaaagtgaccgccatgaagtgttttctgctggagctgcaggtgatttctctggaaagcggagatgcctctatccacgacacagtggagaatctgatcatcctggccaacaatagcctgagcagcaatggcaatgtgacagagtctggctgtaaggagtgtgaggagctggaggagaagaacatcaaggagtttctgcagagctttgtgcacatcgtgcagatgttcatcaatacaagctctggcggaggatctggaggaggcggatctggaggaggaggcagtggaggcggaggatctggcggaggatctctgcagattacatgccctcctccaatgtctgtggagcacgccgatatttgggtgaagtcctacagcctgtacagcagagagagatacatctgcaacagcggctttaagagaaaggccggcacctcttctctgacagagtgcgtgctgaataaggccacaaatgtggcccactggacaacacctagcctgaagtgcattagagatcctgccctggtccaccagaggcctgcccctccatctacagtgacaacagccggagtgacacctcagcctgaatctctgagcccttctggaaaagaacctgccgccagctctcctagctctaataataccgccgccacaacagccgccattgtgcctggatctcagctgatgcctagcaagtctcctagcacaggcacaacagagatcagcagccacgaatcttctcacggaacaccttctcagaccaccgccaagaattgggagctgacagcctctgcctctcaccagcctccaggagtgtatcctcagggccactctgatacaacagtggccatcagcacatctacagtgctgctgtgtggactgtctgccgtgtctctgctggcctgttacctgaagtctagacagacacctcctctggcctctgtggagatggaggccatggaagccctgcctgtgacatggggaacaagcagcagagatgaagacctggagaattgttctcaccacctg

SEQ ID NO: 75 - skipped

SEQ ID NO: 76 - protein, 114 aa, synthetic construct
NWVNVISDLKKIEDLIQSMHIDATLYTESDVHPSCKVTAMKCFLLELQVISLESGDASIHDTVENLIILANNSLSSNGNVTESGCKECEELEEKNIKEFLQSFVHIVQMFINTS

SEQ ID NO: 77 - DNA, 342 bp, synthetic construct
  source 1..342: mol_type = other DNA
aactgggtgaatgtgatcagcgacctgaagaagatcgaggatctgatccagagcatgcacattgatgccaccctgtacacagaatctgatgtgcaccctagctgtaaagtgaccgccatgaagtgttttctgctggagctgcaggtgatttctctggaaagcggagatgcctctatccacgacacagtggagaatctgatcatcctggccaacaatagcctgagcagcaatggcaatgtgacagagtctggctgtaaggagtgtgaggagctggaggagaagaacatcaaggagtttctgcagagctttgtgcacatcgtgcagatgttcatcaatacaagc

SEQ ID NO: 78 - protein, 237 aa, synthetic construct
ITCPPPMSVEHADIWVKSYSLYSRERYICNSGFKRKAGTSSLTECVLNKATNVAHWTTPSLKCIRDPALVHQRPAPPSTVTTAGVTPQPESLSPSGKEPAASSPSSNNTAATTAAIVPGSQLMPSKSPSTGTTEISSHESSHGTPSQTTAKNWELTASASHQPPGVYPQGHSDTTVAISTSTVLLCGLSAVSLLACYLKSRQTPPLASVEMEAMEALPVTWGTSSRDEDLENCSHHL

SEQ ID NO: 79 - DNA, 711 bp, synthetic construct
  source 1..711: mol_type = other DNA
attacatgccctcctccaatgtctgtggagcacgccgatatttgggtgaagtcctacagcctgtacagcagagagagatacatctgcaacagcggctttaagagaaaggccggcacctcttctctgacagagtgcgtgctgaataaggccacaaatgtggcccactggacaacacctagcctgaagtgcattagagatcctgccctggtccaccagaggcctgcccctccatctacagtgacaacagccggagtgacacctcagcctgaatctctgagcccttctggaaaagaacctgccgccagctctcctagctctaataataccgccgccacaacagccgccattgtgcctggatctcagctgatgcctagcaagtctcctagcacaggcacaacagagatcagcagccacgaatcttctcacggaacaccttctcagaccaccgccaagaattgggagctgacagcctctgcctctcaccagcctccaggagtgtatcctcagggccactctgatacaacagtggccatcagcacatctacagtgctgctgtgtggactgtctgccgtgtctctgctggcctgttacctgaagtctagacagacacctcctctggcctctgtggagatggaggccatggaagccctgcctgtgacatggggaacaagcagcagagatgaagacctggagaattgttctcaccacctg

SEQ ID NO: 80 - skipped

SEQ ID NO: 81 - protein, 26 aa, synthetic construct
SGGGSGGGGSGGGGSGGGGSGGGSLQ

SEQ ID NO: 82 - DNA, 78 bp, synthetic construct
  source 1..78: mol_type = other DNA
tctggcggaggatctggaggaggcggatctggaggaggaggcagtggaggcggaggatctggcggaggatctctgcag

SEQ ID NO: 83 - protein, 18 aa, synthetic construct
MDWTWILFLVAAATRVHS

SEQ ID NO: 84 - DNA, 54 bp, synthetic construct
  source 1..54: mol_type = other DNA
atggattggacctggattctgtttctggtggccgctgccacaagagtgcacagc

SEQ ID NO: 85-99 - skipped (15 entries)

SEQ ID NO: 100 - protein, 264 aa, synthetic construct
MRLPAQLLGLLMLWVPGSSGRKVCNGIGIGEFKDSLSINATNIKHFKNCTSISGDLHILPVAFRGDSFTHTPPLDPQELDILKTVKEITGFLLIQAWPENRTDLHAFENLEIIRGRTKQHGQFSLAVVSLNITSLGLRSLKEISDGDVIISGNKNLCYANTINWKKLFGTSGQKTKIISNRGENSCKATGQVCHALCSPEGCWGPEPRDCVSGGGGSGGGGSGGGGSGGGGSFWVLVVVGGVLACYSLLVTVAFIIFWVRSKRS

SEQ ID NO: 101-102 - skipped (2 entries)

SEQ ID NO: 103 - protein, 244 aa, synthetic construct
RKVCNGIGIGEFKDSLSINATNIKHFKNCTSISGDLHILPVAFRGDSFTHTPPLDPQELDILKTVKEITGFLLIQAWPENRTDLHAFENLEIIRGRTKQHGQFSLAVVSLNITSLGLRSLKEISDGDVIISGNKNLCYANTINWKKLFGTSGQKTKIISNRGENSCKATGQVCHALCSPEGCWGPEPRDCVSGGGGSGGGGSGGGGSGGGGSFWVLVVVGGVLACYSLLVTVAFIIFWVRSKRS

SEQ ID NO: 104 - protein, 171 aa, synthetic construct
RKVCNGIGIGEFKDSLSINATNIKHFKNCTSISGDLHILPVAFRGDSFTHTPPLDPQELDILKTVKEITGFLLIQAWPENRTDLHAFENLEIIRGRTKQHGQFSLAVVSLNITSLGLRSLKEISDGDVIISGNKNLCYANTINWKKLFGTSGQKTKIISNRGENSCKATGQ

SEQ ID NO: 105 - protein, 141 aa, synthetic construct
VCHALCSPEGCWGPEPRDCVSCRNVSRGRECVDKCNLLEGEPREFVENSECIQCHPECLPQAMNITCTGRGPDNCIQCAHYIDGPHCVKTCPAGVMGENNTLVWKYADAGHVCHLCHPNCTYGCTGPGLEGCPTNGPKIPS

SEQ ID NO: 106 - protein, 21 aa, synthetic construct
VCHALCSPEGCWGPEPRDCVS

SEQ ID NO: 107 - protein, 32 aa, synthetic construct
FWVLVVVGGVLACYSLLVTVAFIIFWVRSKRS

SEQ ID NO: 108 - protein, 20 aa, synthetic construct
GGGGSGGGGSGGGGSGGGGS

SEQ ID NO: 109 - protein, 20 aa, synthetic construct
MRLPAQLLGLLMLWVPGSSG

SEQ ID NO: 110 - protein, 22 aa, synthetic construct
MRMRLPAQLLGLLMLWVPGSSG

SEQ ID NO: 111 - protein, 22 aa, synthetic construct
PRMRLPAQLLGLLMLWVPGSSG

SEQ ID NO: 112 - protein, 355 aa, synthetic construct
MRLPAQLLGLLMLWVPGSSGRKVCNGIGIGEFKDSLSINATNIKHFKNCTSISGDLHILPVAFRGDSFTHTPPLDPQELDILKTVKEITGFLLIQAWPENRTDLHAFENLEIIRGRTKQHGQFSLAVVSLNITSLGLRSLKEISDGDVIISGNKNLCYANTINWKKLFGTSGQKTKIISNRGENSCKATGQVCHALCSPEGCWGPEPRDCVSCRNVSRGRECVDKCNLLEGEPREFVENSECIQCHPECLPQAMNITCTGRGPDNCIQCAHYIDGPHCVKTCPAGVMGENNTLVWKYADAGHVCHLCHPNCTYGCTGPGLEGCPTNGPKIPSIATGMVGALLLLLVVALGIGLFM

SEQ ID NO: 113 - protein, 335 aa, synthetic construct
RKVCNGIGIGEFKDSLSINATNIKHFKNCTSISGDLHILPVAFRGDSFTHTPPLDPQELDILKTVKEITGFLLIQAWPENRTDLHAFENLEIIRGRTKQHGQFSLAVVSLNITSLGLRSLKEISDGDVIISGNKNLCYANTINWKKLFGTSGQKTKIISNRGENSCKATGQVCHALCSPEGCWGPEPRDCVSCRNVSRGRECVDKCNLLEGEPREFVENSECIQCHPECLPQAMNITCTGRGPDNCIQCAHYIDGPHCVKTCPAGVMGENNTLVWKYADAGHVCHLCHPNCTYGCTGPGLEGCPTNGPKIPSIATGMVGALLLLLVVALGIGLFM

SEQ ID NO: 114 - protein, 297 aa, synthetic construct
MTTPRNSVNGTFPAEPMKGPIAMQSGPKPLFRRMSSLVGPTQSFFMRESKTLGAVQIMNGLFHIALGGLLMIPAGIYAPICVTVWYPLWGGIMYIISGSLLAATEKNSRKCLVKGKMIMNSLSLFAAISGMILSIMDILNIKISHFLKMESLNFIRAHTPYINIYNCEPANPSEKNSPSTQYCYSIQSLFLGILSVMLIFAFFQELVIAGIVENEWKRTCSRPKSNIVLLSAEEKKEQTIEIKEEVVGLTETSSQPKNEEDIEIIPIQEEEEEETETNFPEPPQDQESSPIENDSSP

SEQ ID NO: 115 - protein, 263 aa, synthetic construct
MTTPRNSVNGTFPAEPMKGPIAMQSGPKPLFRRMSSLVGPTQSFFMRESKTLGAVQIMNGLFHIALGGLLMIPAGIYAPICVTVWYPLWGGIMYIISGSLLAATEKNSRKCLVKGKMIMNSLSLFAAISGMILSIMDILNIKISHFLKMESLNFIRAHTPYINIYNCEPANPSEKNSPSTQYCYSIQSLFLGILSVMLIFAFFQELVIAGIVENEWKRTCSRPKSNIVLLSAEEKKEQTIEIKEEVVGLTETSSQPKNEEDIE

SEQ ID NO: 116-149 - skipped (34 entries)

SEQ ID NO: 150 - DNA, 551 bp, synthetic construct
  source 1..551: mol_type = other DNA
ggatctgcgatcgctccggtgcccgtcagtgggcagagcgcacatcgcccacagtccccgagaagttggggggaggggtcggcaattgaaccggtgcctagagaaggtggcgcggggtaaactgggaaagtgatgtcgtgtactggctccgcctttttcccgagggtgggggagaaccgtatataagtgcagtagtcgccgtgaacgttctttttcgcaacgggtttgccgccagaacacagctgaagcttcgaggggctcgcatctctccttcacgcgcccgccgccctacctgaggccgccatccacgccggttgagtcgcgttctgccgcctcccgcctgtggtgcctcctgaactgcgtccgccgtctaggtaagtttaaagctcaggtcgagaccgggcctttgtccggcgctcccttggagcctacctagactcagccggctctccacgctttgcctgaccctgcttgctcaactctacgtctttgtttcgttttctgttctgcgccgttacagatccaagctgtgaccggcgcctacctgagat

SEQ ID NO: 151 - DNA, 231 bp, synthetic construct
  source 1..231: mol_type = other DNA
gatctgctgtgccttctagttgccagccatctgttgtttgcccctcccccgtgccttccttgaccctggaaggtgccactcccactgtcctttcctaataaaatgaggaaattgcatcgcattgtctgagtaggtgtcattctattctggggggtggggtggggcaggacagcaagggggaggattgggaagacaatagcaggcatgctggggatgcggtgggctctatgg

SEQ ID NO: 152-159 - skipped (8 entries)

SEQ ID NO: 160 - protein, 164 aa, synthetic construct
  VARIANT 1: note = X can be N,D,H or Y
  VARIANT 48: note = X can be T or C
  VARIANT 112: note = X can be S,A,V,L,I,P,F,M or W
  VARIANT 114: note = X can be M,A,V,L,I,P,F or W
  VARIANT 115: note = X can be G,A,V,L,I,P,F,M or W
XIQNPEPAVYQLKDPRSQDSTLCLFTDFDSQINVPKTMESGTFITDKXVLDMKAMDSKSNGAIAWSNQTSFTCQDIFKETNATYPSSDVPCDATLTEKSFETDMNLNFQNLXVXXLRILLLKVAGFNLLMTLRLWSSRAKRSGSGATNFSLLKQAGDVEENPGP

SEQ ID NO: 161 - protein, 594 aa, synthetic construct
  VARIANT 57: note = X can be S or C
EDLRNVTPPKVSLFEPSKAEIANKQKATLVCLARGFFPDHVELSWWVNGKEVHSGVXTDPQAYKESNYSYCLSSRLRVSATFWHNPRNHFRCQVQFHGLSEEDKWPEGSPKPVTQNISAEAWGRADCGITSASYQQGVLSATILYEILLGKATLYAVLVSTLVVMAMVKRKNSRAKRSGSGEGRGSLLTCGDVEENPGPMDWTWILFLVAAATRVHSNWVNVISDLKKIEDLIQSMHIDATLYTESDVHPSCKVTAMKCFLLELQVISLESGDASIHDTVENLIILANNSLSSNGNVTESGCKECEELEEKNIKEFLQSFVHIVQMFINTSSGGGSGGGGSGGGGSGGGGSGGGSLQITCPPPMSVEHADIWVKSYSLYSRERYICNSGFKRKAGTSSLTECVLNKATNVAHWTTPSLKCIRDPALVHQRPAPPSTVTTAGVTPQPESLSPSGKEPAASSPSSNNTAATTAAIVPGSQLMPSKSPSTGTTEISSHESSHGTPSQTTAKNWELTASASHQPPGVYPQGHSDTTVAISTSTVLLCGLSAVSLLACYLKSRQTPPLASVEMEAMEALPVTWGTSSRDEDLENCSHHL

SEQ ID NO: 162 - protein, 163 aa, synthetic construct
  VARIANT 1: note = X can be N,D,H or Y
  VARIANT 48: note = X can be T or C
  VARIANT 112: note = X can be S,A,V,L,I,P,F,M or W
  VARIANT 114: note = X can be M,A,V,L,I,P,F or W
  VARIANT 115: note = X can be G,A,V,L,I,P,F,M or W
XIQNPEPAVYQLKDPRSQDSTLCLFTDFDSQINVPKTMESGTFITDKXVLDMKAMDSKSNGAIAWSNQTSFTCQDIFKETNATYPSSDVPCDATLTEKSFETDMNLNFQNLXVXXLRILLLKVAGFNLLMTLRLWSSRAKRSGSGEGRGSLLTCGDVEENPGP

SEQ ID NO: 163 - protein, 595 aa, synthetic construct
  VARIANT 57: note = X can be S or C
EDLRNVTPPKVSLFEPSKAEIANKQKATLVCLARGFFPDHVELSWWVNGKEVHSGVXTDPQAYKESNYSYCLSSRLRVSATFWHNPRNHFRCQVQFHGLSEEDKWPEGSPKPVTQNISAEAWGRADCGITSASYQQGVLSATILYEILLGKATLYAVLVSTLVVMAMVKRKNSRAKRSGSGATNFSLLKQAGDVEENPGPMDWTWILFLVAAATRVHSNWVNVISDLKKIEDLIQSMHIDATLYTESDVHPSCKVTAMKCFLLELQVISLESGDASIHDTVENLIILANNSLSSNGNVTESGCKECEELEEKNIKEFLQSFVHIVQMFINTSSGGGSGGGGSGGGGSGGGGSGGGSLQITCPPPMSVEHADIWVKSYSLYSRERYICNSGFKRKAGTSSLTECVLNKATNVAHWTTPSLKCIRDPALVHQRPAPPSTVTTAGVTPQPESLSPSGKEPAASSPSSNNTAATTAAIVPGSQLMPSKSPSTGTTEISSHESSHGTPSQTTAKNWELTASASHQPPGVYPQGHSDTTVAISTSTVLLCGLSAVSLLACYLKSRQTPPLASVEMEAMEALPVTWGTSSRDEDLENCSHHL

SEQ ID NO: 164 - protein, 585 aa, synthetic construct
  VARIANT 1: note = X can be N,D,H or Y
  VARIANT 48: note = X can be T or C
  VARIANT 112: note = X can be S,A,V,L,I,P,F,M or W
  VARIANT 114: note = X can be M,A,V,L,I,P,F or W
  VARIANT 115: note = X can be G,A,V,L,I,P,F,M or W
XIQNPEPAVYQLKDPRSQDSTLCLFTDFDSQINVPKTMESGTFITDKXVLDMKAMDSKSNGAIAWSNQTSFTCQDIFKETNATYPSSDVPCDATLTEKSFETDMNLNFQNLXVXXLRILLLKVAGFNLLMTLRLWSSRAKRSGSGATNFSLLKQAGDVEENPGPMDWTWILFLVAAATRVHSNWVNVISDLKKIEDLIQSMHIDATLYTESDVHPSCKVTAMKCFLLELQVISLESGDASIHDTVENLIILANNSLSSNGNVTESGCKECEELEEKNIKEFLQSFVHIVQMFINTSSGGGSGGGGSGGGGSGGGGSGGGSLQITCPPPMSVEHADIWVKSYSLYSRERYICNSGFKRKAGTSSLTECVLNKATNVAHWTTPSLKCIRDPALVHQRPAPPSTVTTAGVTPQPESLSPSGKEPAASSPSSNNTAATTAAIVPGSQLMPSKSPSTGTTEISSHESSHGTPSQTTAKNWELTASASHQPPGVYPQGHSDTTVAISTSTVLLCGLSAVSLLACYLKSRQTPPLASVEMEAMEALPVTWGTSSRDEDLENCSHHLRAKRSGSGEGRGSLLTCGDVEENPGP

SEQ ID NO: 165 - protein, 585 aa, synthetic construct
  VARIANT 1: note = X can be N,D,H or Y
  VARIANT 48: note = X can be T or C
  VARIANT 112: note = X can be S,A,V,L,I,P,F,M or W
  VARIANT 114: note = X can be M,A,V,L,I,P,F or W
  VARIANT 115: note = X can be G,A,V,L,I,P,F,M or W
XIQNPEPAVYQLKDPRSQDSTLCLFTDFDSQINVPKTMESGTFITDKXVLDMKAMDSKSNGAIAWSNQTSFTCQDIFKETNATYPSSDVPCDATLTEKSFETDMNLNFQNLXVXXLRILLLKVAGFNLLMTLRLWSSRAKRSGSGEGRGSLLTCGDVEENPGPMDWTWILFLVAAATRVHSNWVNVISDLKKIEDLIQSMHIDATLYTESDVHPSCKVTAMKCFLLELQVISLESGDASIHDTVENLIILANNSLSSNGNVTESGCKECEELEEKNIKEFLQSFVHIVQMFINTSSGGGSGGGGSGGGGSGGGGSGGGSLQITCPPPMSVEHADIWVKSYSLYSRERYICNSGFKRKAGTSSLTECVLNKATNVAHWTTPSLKCIRDPALVHQRPAPPSTVTTAGVTPQPESLSPSGKEPAASSPSSNNTAATTAAIVPGSQLMPSKSPSTGTTEISSHESSHGTPSQTTAKNWELTASASHQPPGVYPQGHSDTTVAISTSTVLLCGLSAVSLLACYLKSRQTPPLASVEMEAMEALPVTWGTSSRDEDLENCSHHLRAKRSGSGATNFSLLKQAGDVEENPGP

SEQ ID NO: 166 - protein, 200 aa, synthetic construct
  VARIANT 57: note = X can be S or C
EDLRNVTPPKVSLFEPSKAEIANKQKATLVCLARGFFPDHVELSWWVNGKEVHSGVXTDPQAYKESNYSYCLSSRLRVSATFWHNPRNHFRCQVQFHGLSEEDKWPEGSPKPVTQNISAEAWGRADCGITSASYQQGVLSATILYEILLGKATLYAVLVSTLVVMAMVKRKNSRAKRSGSGATNFSLLKQAGDVEENPGP

SEQ ID NO: 167 - protein, 558 aa, synthetic construct
  VARIANT 1: note = X can be N,D,H or Y
  VARIANT 48: note = X can be T or C
  VARIANT 112: note = X can be S,A,V,L,I,P,F,M or W
  VARIANT 114: note = X can be M,A,V,L,I,P,F or W
  VARIANT 115: note = X can be G,A,V,L,I,P,F,M or W
XIQNPEPAVYQLKDPRSQDSTLCLFTDFDSQINVPKTMESGTFITDKXVLDMKAMDSKSNGAIAWSNQTSFTCQDIFKETNATYPSSDVPCDATLTEKSFETDMNLNFQNLXVXXLRILLLKVAGFNLLMTLRLWSSRAKRSGSGEGRGSLLTCGDVEENPGPMDWTWILFLVAAATRVHSNWVNVISDLKKIEDLIQSMHIDATLYTESDVHPSCKVTAMKCFLLELQVISLESGDASIHDTVENLIILANNSLSSNGNVTESGCKECEELEEKNIKEFLQSFVHIVQMFINTSSGGGSGGGGSGGGGSGGGGSGGGSLQITCPPPMSVEHADIWVKSYSLYSRERYICNSGFKRKAGTSSLTECVLNKATNVAHWTTPSLKCIRDPALVHQRPAPPSTVTTAGVTPQPESLSPSGKEPAASSPSSNNTAATTAAIVPGSQLMPSKSPSTGTTEISSHESSHGTPSQTTAKNWELTASASHQPPGVYPQGHSDTTVAISTSTVLLCGLSAVSLLACYLKSRQTPPLASVEMEAMEALPVTWGTSSRDEDLENCSHHL

SEQ ID NO: 168 - protein, 199 aa, synthetic construct
  VARIANT 57: note = X can be S or C
EDLRNVTPPKVSLFEPSKAEIANKQKATLVCLARGFFPDHVELSWWVNGKEVHSGVXTDPQAYKESNYSYCLSSRLRVSATFWHNPRNHFRCQVQFHGLSEEDKWPEGSPKPVTQNISAEAWGRADCGITSASYQQGVLSATILYEILLGKATLYAVLVSTLVVMAMVKRKNSRAKRSGSGEGRGSLLTCGDVEENPGP

SEQ ID NO: 169 - protein, 559 aa, synthetic construct
  VARIANT 1: note = X can be N,D,H or Y
  VARIANT 48: note = X can be T or C
  VARIANT 112: note = X can be S,A,V,L,I,P,F,M or W
  VARIANT 114: note = X can be M,A,V,L,I,P,F or W
  VARIANT 115: note = X can be G,A,V,L,I,P,F,M or W
XIQNPEPAVYQLKDPRSQDSTLCLFTDFDSQINVPKTMESGTFITDKXVLDMKAMDSKSNGAIAWSNQTSFTCQDIFKETNATYPSSDVPCDATLTEKSFETDMNLNFQNLXVXXLRILLLKVAGFNLLMTLRLWSSRAKRSGSGATNFSLLKQAGDVEENPGPMDWTWILFLVAAATRVHSNWVNVISDLKKIEDLIQSMHIDATLYTESDVHPSCKVTAMKCFLLELQVISLESGDASIHDTVENLIILANNSLSSNGNVTESGCKECEELEEKNIKEFLQSFVHIVQMFINTSSGGGSGGGGSGGGGSGGGGSGGGSLQITCPPPMSVEHADIWVKSYSLYSRERYICNSGFKRKAGTSSLTECVLNKATNVAHWTTPSLKCIRDPALVHQRPAPPSTVTTAGVTPQPESLSPSGKEPAASSPSSNNTAATTAAIVPGSQLMPSKSPSTGTTEISSHESSHGTPSQTTAKNWELTASASHQPPGVYPQGHSDTTVAISTSTVLLCGLSAVSLLACYLKSRQTPPLASVEMEAMEALPVTWGTSSRDEDLENCSHHL

SEQ ID NO: 170 - protein, 621 aa, synthetic construct
  VARIANT 57: note = X can be S or C
EDLRNVTPPKVSLFEPSKAEIANKQKATLVCLARGFFPDHVELSWWVNGKEVHSGVXTDPQAYKESNYSYCLSSRLRVSATFWHNPRNHFRCQVQFHGLSEEDKWPEGSPKPVTQNISAEAWGRADCGITSASYQQGVLSATILYEILLGKATLYAVLVSTLVVMAMVKRKNSRAKRSGSGATNFSLLKQAGDVEENPGPMDWTWILFLVAAATRVHSNWVNVISDLKKIEDLIQSMHIDATLYTESDVHPSCKVTAMKCFLLELQVISLESGDASIHDTVENLIILANNSLSSNGNVTESGCKECEELEEKNIKEFLQSFVHIVQMFINTSSGGGSGGGGSGGGGSGGGGSGGGSLQITCPPPMSVEHADIWVKSYSLYSRERYICNSGFKRKAGTSSLTECVLNKATNVAHWTTPSLKCIRDPALVHQRPAPPSTVTTAGVTPQPESLSPSGKEPAASSPSSNNTAATTAAIVPGSQLMPSKSPSTGTTEISSHESSHGTPSQTTAKNWELTASASHQPPGVYPQGHSDTTVAISTSTVLLCGLSAVSLLACYLKSRQTPPLASVEMEAMEALPVTWGTSSRDEDLENCSHHLRAKRSGSGEGRGSLLTCGDVEENPGP

SEQ ID NO: 171 - protein, 621 aa, synthetic construct
  VARIANT 57: note = X can be S or C
EDLRNVTPPKVSLFEPSKAEIANKQKATLVCLARGFFPDHVELSWWVNGKEVHSGVXTDPQAYKESNYSYCLSSRLRVSATFWHNPRNHFRCQVQFHGLSEEDKWPEGSPKPVTQNISAEAWGRADCGITSASYQQGVLSATILYEILLGKATLYAVLVSTLVVMAMVKRKNSRAKRSGSGEGRGSLLTCGDVEENPGPMDWTWILFLVAAATRVHSNWVNVISDLKKIEDLIQSMHIDATLYTESDVHPSCKVTAMKCFLLELQVISLESGDASIHDTVENLIILANNSLSSNGNVTESGCKECEELEEKNIKEFLQSFVHIVQMFINTSSGGGSGGGGSGGGGSGGGGSGGGSLQITCPPPMSVEHADIWVKSYSLYSRERYICNSGFKRKAGTSSLTECVLNKATNVAHWTTPSLKCIRDPALVHQRPAPPSTVTTAGVTPQPESLSPSGKEPAASSPSSNNTAATTAAIVPGSQLMPSKSPSTGTTEISSHESSHGTPSQTTAKNWELTASASHQPPGVYPQGHSDTTVAISTSTVLLCGLSAVSLLACYLKSRQTPPLASVEMEAMEALPVTWGTSSRDEDLENCSHHLRAKRSGSGATNFSLLKQAGDVEENPGP

SEQ ID NO: 172 - protein, 422 aa, synthetic construct
MDWTWILFLVAAATRVHSNWVNVISDLKKIEDLIQSMHIDATLYTESDVHPSCKVTAMKCFLLELQVISLESGDASIHDTVENLIILANNSLSSNGNVTESGCKECEELEEKNIKEFLQSFVHIVQMFINTSSGGGSGGGGSGGGGSGGGGSGGGSLQITCPPPMSVEHADIWVKSYSLYSRERYICNSGFKRKAGTSSLTECVLNKATNVAHWTTPSLKCIRDPALVHQRPAPPSTVTTAGVTPQPESLSPSGKEPAASSPSSNNTAATTAAIVPGSQLMPSKSPSTGTTEISSHESSHGTPSQTTAKNWELTASASHQPPGVYPQGHSDTTVAISTSTVLLCGLSAVSLLACYLKSRQTPPLASVEMEAMEALPVTWGTSSRDEDLENCSHHLRAKRSGSGATNFSLLKQAGDVEENPGP

SEQ ID NO: 173 - protein, 421 aa, synthetic construct
MDWTWILFLVAAATRVHSNWVNVISDLKKIEDLIQSMHIDATLYTESDVHPSCKVTAMKCFLLELQVISLESGDASIHDTVENLIILANNSLSSNGNVTESGCKECEELEEKNIKEFLQSFVHIVQMFINTSSGGGSGGGGSGGGGSGGGGSGGGSLQITCPPPMSVEHADIWVKSYSLYSRERYICNSGFKRKAGTSSLTECVLNKATNVAHWTTPSLKCIRDPALVHQRPAPPSTVTTAGVTPQPESLSPSGKEPAASSPSSNNTAATTAAIVPGSQLMPSKSPSTGTTEISSHESSHGTPSQTTAKNWELTASASHQPPGVYPQGHSDTTVAISTSTVLLCGLSAVSLLACYLKSRQTPPLASVEMEAMEALPVTWGTSSRDEDLENCSHHLRAKRSGSGEGRGSLLTCGDVEENPGP

SEQ ID NO: 174-179 - skipped (6 entries)

SEQ ID NO: 180 - protein, 164 aa, synthetic construct
NIQNPEPAVYQLKDPRSQDSTLCLFTDFDSQINVPKTMESGTFITDKCVLDMKAMDSKSNGAIAWSNQTSFTCQDIFKETNATYPSSDVPCDATLTEKSFETDMNLNFQNLLVIVLRILLLKVAGFNLLMTLRLWSSRAKRSGSGATNFSLLKQAGDVEENPGP

SEQ ID NO: 181 - protein, 594 aa, synthetic construct
EDLRNVTPPKVSLFEPSKAEIANKQKATLVCLARGFFPDHVELSWWVNGKEVHSGVCTDPQAYKESNYSYCLSSRLRVSATFWHNPRNHFRCQVQFHGLSEEDKWPEGSPKPVTQNISAEAWGRADCGITSASYQQGVLSATILYEILLGKATLYAVLVSTLVVMAMVKRKNSRAKRSGSGEGRGSLLTCGDVEENPGPMDWTWILFLVAAATRVHSNWVNVISDLKKIEDLIQSMHIDATLYTESDVHPSCKVTAMKCFLLELQVISLESGDASIHDTVENLIILANNSLSSNGNVTESGCKECEELEEKNIKEFLQSFVHIVQMFINTSSGGGSGGGGSGGGGSGGGGSGGGSLQITCPPPMSVEHADIWVKSYSLYSRERYICNSGFKRKAGTSSLTECVLNKATNVAHWTTPSLKCIRDPALVHQRPAPPSTVTTAGVTPQPESLSPSGKEPAASSPSSNNTAATTAAIVPGSQLMPSKSPSTGTTEISSHESSHGTPSQTTAKNWELTASASHQPPGVYPQGHSDTTVAISTSTVLLCGLSAVSLLACYLKSRQTPPLASVEMEAMEALPVTWGTSSRDEDLENCSHHL

SEQ ID NO: 182 - protein, 163 aa, synthetic construct
NIQNPEPAVYQLKDPRSQDSTLCLFTDFDSQINVPKTMESGTFITDKCVLDMKAMDSKSNGAIAWSNQTSFTCQDIFKETNATYPSSDVPCDATLTEKSFETDMNLNFQNLLVIVLRILLLKVAGFNLLMTLRLWSSRAKRSGSGEGRGSLLTCGDVEENPGP

SEQ ID NO: 183 - protein, 595 aa, synthetic construct
EDLRNVTPPKVSLFEPSKAEIANKQKATLVCLARGFFPDHVELSWWVNGKEVHSGVCTDPQAYKESNYSYCLSSRLRVSATFWHNPRNHFRCQVQFHGLSEEDKWPEGSPKPVTQNISAEAWGRADCGITSASYQQGVLSATILYEILLGKATLYAVLVSTLVVMAMVKRKNSRAKRSGSGATNFSLLKQAGDVEENPGPMDWTWILFLVAAATRVHSNWVNVISDLKKIEDLIQSMHIDATLYTESDVHPSCKVTAMKCFLLELQVISLESGDASIHDTVENLIILANNSLSSNGNVTESGCKECEELEEKNIKEFLQSFVHIVQMFINTSSGGGSGGGGSGGGGSGGGGSGGGSLQITCPPPMSVEHADIWVKSYSLYSRERYICNSGFKRKAGTSSLTECVLNKATNVAHWTTPSLKCIRDPALVHQRPAPPSTVTTAGVTPQPESLSPSGKEPAASSPSSNNTAATTAAIVPGSQLMPSKSPSTGTTEISSHESSHGTPSQTTAKNWELTASASHQPPGVYPQGHSDTTVAISTSTVLLCGLSAVSLLACYLKSRQTPPLASVEMEAMEALPVTWGTSSRDEDLENCSHHL

SEQ ID NO: 184 - protein, 585 aa, synthetic construct
NIQNPEPAVYQLKDPRSQDSTLCLFTDFDSQINVPKTMESGTFITDKCVLDMKAMDSKSNGAIAWSNQTSFTCQDIFKETNATYPSSDVPCDATLTEKSFETDMNLNFQNLLVIVLRILLLKVAGFNLLMTLRLWSSRAKRSGSGATNFSLLKQAGDVEENPGPMDWTWILFLVAAATRVHSNWVNVISDLKKIEDLIQSMHIDATLYTESDVHPSCKVTAMKCFLLELQVISLESGDASIHDTVENLIILANNSLSSNGNVTESGCKECEELEEKNIKEFLQSFVHIVQMFINTSSGGGSGGGGSGGGGSGGGGSGGGSLQITCPPPMSVEHADIWVKSYSLYSRERYICNSGFKRKAGTSSLTECVLNKATNVAHWTTPSLKCIRDPALVHQRPAPPSTVTTAGVTPQPESLSPSGKEPAASSPSSNNTAATTAAIVPGSQLMPSKSPSTGTTEISSHESSHGTPSQTTAKNWELTASASHQPPGVYPQGHSDTTVAISTSTVLLCGLSAVSLLACYLKSRQTPPLASVEMEAMEALPVTWGTSSRDEDLENCSHHLRAKRSGSGEGRGSLLTCGDVEENPGP

SEQ ID NO: 185 - protein, 585 aa, synthetic construct
NIQNPEPAVYQLKDPRSQDSTLCLFTDFDSQINVPKTMESGTFITDKCVLDMKAMDSKSNGAIAWSNQTSFTCQDIFKETNATYPSSDVPCDATLTEKSFETDMNLNFQNLLVIVLRILLLKVAGFNLLMTLRLWSSRAKRSGSGEGRGSLLTCGDVEENPGPMDWTWILFLVAAATRVHSNWVNVISDLKKIEDLIQSMHIDATLYTESDVHPSCKVTAMKCFLLELQVISLESGDASIHDTVENLIILANNSLSSNGNVTESGCKECEELEEKNIKEFLQSFVHIVQMFINTSSGGGSGGGGSGGGGSGGGGSGGGSLQITCPPPMSVEHADIWVKSYSLYSRERYICNSGFKRKAGTSSLTECVLNKATNVAHWTTPSLKCIRDPALVHQRPAPPSTVTTAGVTPQPESLSPSGKEPAASSPSSNNTAATTAAIVPGSQLMPSKSPSTGTTEISSHESSHGTPSQTTAKNWELTASASHQPPGVYPQGHSDTTVAISTSTVLLCGLSAVSLLACYLKSRQTPPLASVEMEAMEALPVTWGTSSRDEDLENCSHHLRAKRSGSGATNFSLLKQAGDVEENPGP

SEQ ID NO: 186 - protein, 200 aa, synthetic construct
EDLRNVTPPKVSLFEPSKAEIANKQKATLVCLARGFFPDHVELSWWVNGKEVHSGVCTDPQAYKESNYSYCLSSRLRVSATFWHNPRNHFRCQVQFHGLSEEDKWPEGSPKPVTQNISAEAWGRADCGITSASYQQGVLSATILYEILLGKATLYAVLVSTLVVMAMVKRKNSRAKRSGSGATNFSLLKQAGDVEENPGP

SEQ ID NO: 187 - protein, 558 aa, synthetic construct
NIQNPEPAVYQLKDPRSQDSTLCLFTDFDSQINVPKTMESGTFITDKCVLDMKAMDSKSNGAIAWSNQTSFTCQDIFKETNATYPSSDVPCDATLTEKSFETDMNLNFQNLLVIVLRILLLKVAGFNLLMTLRLWSSRAKRSGSGEGRGSLLTCGDVEENPGPMDWTWILFLVAAATRVHSNWVNVISDLKKIEDLIQSMHIDATLYTESDVHPSCKVTAMKCFLLELQVISLESGDASIHDTVENLIILANNSLSSNGNVTESGCKECEELEEKNIKEFLQSFVHIVQMFINTSSGGGSGGGGSGGGGSGGGGSGGGSLQITCPPPMSVEHADIWVKSYSLYSRERYICNSGFKRKAGTSSLTECVLNKATNVAHWTTPSLKCIRDPALVHQRPAPPSTVTTAGVTPQPESLSPSGKEPAASSPSSNNTAATTAAIVPGSQLMPSKSPSTGTTEISSHESSHGTPSQTTAKNWELTASASHQPPGVYPQGHSDTTVAISTSTVLLCGLSAVSLLACYLKSRQTPPLASVEMEAMEALPVTWGTSSRDEDLENCSHHL

SEQ ID NO: 188 - protein, 199 aa, synthetic construct
EDLRNVTPPKVSLFEPSKAEIANKQKATLVCLARGFFPDHVELSWWVNGKEVHSGVCTDPQAYKESNYSYCLSSRLRVSATFWHNPRNHFRCQVQFHGLSEEDKWPEGSPKPVTQNISAEAWGRADCGITSASYQQGVLSATILYEILLGKATLYAVLVSTLVVMAMVKRKNSRAKRSGSGEGRGSLLTCGDVEENPGP

SEQ ID NO: 189 - protein, 559 aa, synthetic construct
NIQNPEPAVYQLKDPRSQDSTLCLFTDFDSQINVPKTMESGTFITDKCVLDMKAMDSKSNGAIAWSNQTSFTCQDIFKETNATYPSSDVPCDATLTEKSFETDMNLNFQNLLVIVLRILLLKVAGFNLLMTLRLWSSRAKRSGSGATNFSLLKQAGDVEENPGPMDWTWILFLVAAATRVHSNWVNVISDLKKIEDLIQSMHIDATLYTESDVHPSCKVTAMKCFLLELQVISLESGDASIHDTVENLIILANNSLSSNGNVTESGCKECEELEEKNIKEFLQSFVHIVQMFINTSSGGGSGGGGSGGGGSGGGGSGGGSLQITCPPPMSVEHADIWVKSYSLYSRERYICNSGFKRKAGTSSLTECVLNKATNVAHWTTPSLKCIRDPALVHQRPAPPSTVTTAGVTPQPESLSPSGKEPAASSPSSNNTAATTAAIVPGSQLMPSKSPSTGTTEISSHESSHGTPSQTTAKNWELTASASHQPPGVYPQGHSDTTVAISTSTVLLCGLSAVSLLACYLKSRQTPPLASVEMEAMEALPVTWGTSSRDEDLENCSHHL

SEQ ID NO: 190 - protein, 621 aa, synthetic construct
EDLRNVTPPKVSLFEPSKAEIANKQKATLVCLARGFFPDHVELSWWVNGKEVHSGVCTDPQAYKESNYSYCLSSRLRVSATFWHNPRNHFRCQVQFHGLSEEDKWPEGSPKPVTQNISAEAWGRADCGITSASYQQGVLSATILYEILLGKATLYAVLVSTLVVMAMVKRKNSRAKRSGSGATNFSLLKQAGDVEENPGPMDWTWILFLVAAATRVHSNWVNVISDLKKIEDLIQSMHIDATLYTESDVHPSCKVTAMKCFLLELQVISLESGDASIHDTVENLIILANNSLSSNGNVTESGCKECEELEEKNIKEFLQSFVHIVQMFINTSSGGGSGGGGSGGGGSGGGGSGGGSLQITCPPPMSVEHADIWVKSYSLYSRERYICNSGFKRKAGTSSLTECVLNKATNVAHWTTPSLKCIRDPALVHQRPAPPSTVTTAGVTPQPESLSPSGKEPAASSPSSNNTAATTAAIVPGSQLMPSKSPSTGTTEISSHESSHGTPSQTTAKNWELTASASHQPPGVYPQGHSDTTVAISTSTVLLCGLSAVSLLACYLKSRQTPPLASVEMEAMEALPVTWGTSSRDEDLENCSHHLRAKRSGSGEGRGSLLTCGDVEENPGP

SEQ ID NO: 191 - protein, 621 aa, synthetic construct
EDLRNVTPPKVSLFEPSKAEIANKQKATLVCLARGFFPDHVELSWWVNGKEVHSGVCTDPQAYKESNYSYCLSSRLRVSATFWHNPRNHFRCQVQFHGLSEEDKWPEGSPKPVTQNISAEAWGRADCGITSASYQQGVLSATILYEILLGKATLYAVLVSTLVVMAMVKRKNSRAKRSGSGEGRGSLLTCGDVEENPGPMDWTWILFLVAAATRVHSNWVNVISDLKKIEDLIQSMHIDATLYTESDVHPSCKVTAMKCFLLELQVISLESGDASIHDTVENLIILANNSLSSNGNVTESGCKECEELEEKNIKEFLQSFVHIVQMFINTSSGGGSGGGGSGGGGSGGGGSGGGSLQITCPPPMSVEHADIWVKSYSLYSRERYICNSGFKRKAGTSSLTECVLNKATNVAHWTTPSLKCIRDPALVHQRPAPPSTVTTAGVTPQPESLSPSGKEPAASSPSSNNTAATTAAIVPGSQLMPSKSPSTGTTEISSHESSHGTPSQTTAKNWELTASASHQPPGVYPQGHSDTTVAISTSTVLLCGLSAVSLLACYLKSRQTPPLASVEMEAMEALPVTWGTSSRDEDLENCSHHLRAKRSGSGATNFSLLKQAGDVEENPGP

SEQ ID NO: 192-209 - skipped (18 entries)

SEQ ID NO: 210 - protein, 164 aa, synthetic construct
NIQNPEPAVYQLKDPRSQDSTLCLFTDFDSQINVPKTMESGTFITDKTVLDMKAMDSKSNGAIAWSNQTSFTCQDIFKETNATYPSSDVPCDATLTEKSFETDMNLNFQNLLVIVLRILLLKVAGFNLLMTLRLWSSRAKRSGSGATNFSLLKQAGDVEENPGP

SEQ ID NO: 211 - skipped

SEQ ID NO: 212 - protein, 163 aa, synthetic construct
NIQNPEPAVYQLKDPRSQDSTLCLFTDFDSQINVPKTMESGTFITDKTVLDMKAMDSKSNGAIAWSNQTSFTCQDIFKETNATYPSSDVPCDATLTEKSFETDMNLNFQNLLVIVLRILLLKVAGFNLLMTLRLWSSRAKRSGSGEGRGSLLTCGDVEENPGP

SEQ ID NO: 213 - skipped

SEQ ID NO: 214 - protein, 585 aa, synthetic construct
NIQNPEPAVYQLKDPRSQDSTLCLFTDFDSQINVPKTMESGTFITDKTVLDMKAMDSKSNGAIAWSNQTSFTCQDIFKETNATYPSSDVPCDATLTEKSFETDMNLNFQNLLVIVLRILLLKVAGFNLLMTLRLWSSRAKRSGSGATNFSLLKQAGDVEENPGPMDWTWILFLVAAATRVHSNWVNVISDLKKIEDLIQSMHIDATLYTESDVHPSCKVTAMKCFLLELQVISLESGDASIHDTVENLIILANNSLSSNGNVTESGCKECEELEEKNIKEFLQSFVHIVQMFINTSSGGGSGGGGSGGGGSGGGGSGGGSLQITCPPPMSVEHADIWVKSYSLYSRERYICNSGFKRKAGTSSLTECVLNKATNVAHWTTPSLKCIRDPALVHQRPAPPSTVTTAGVTPQPESLSPSGKEPAASSPSSNNTAATTAAIVPGSQLMPSKSPSTGTTEISSHESSHGTPSQTTAKNWELTASASHQPPGVYPQGHSDTTVAISTSTVLLCGLSAVSLLACYLKSRQTPPLASVEMEAMEALPVTWGTSSRDEDLENCSHHLRAKRSGSGEGRGSLLTCGDVEENPGP

SEQ ID NO: 215 - protein, 585 aa, synthetic construct
NIQNPEPAVYQLKDPRSQDSTLCLFTDFDSQINVPKTMESGTFITDKTVLDMKAMDSKSNGAIAWSNQTSFTCQDIFKETNATYPSSDVPCDATLTEKSFETDMNLNFQNLLVIVLRILLLKVAGFNLLMTLRLWSSRAKRSGSGEGRGSLLTCGDVEENPGPMDWTWILFLVAAATRVHSNWVNVISDLKKIEDLIQSMHIDATLYTESDVHPSCKVTAMKCFLLELQVISLESGDASIHDTVENLIILANNSLSSNGNVTESGCKECEELEEKNIKEFLQSFVHIVQMFINTSSGGGSGGGGSGGGGSGGGGSGGGSLQITCPPPMSVEHADIWVKSYSLYSRERYICNSGFKRKAGTSSLTECVLNKATNVAHWTTPSLKCIRDPALVHQRPAPPSTVTTAGVTPQPESLSPSGKEPAASSPSSNNTAATTAAIVPGSQLMPSKSPSTGTTEISSHESSHGTPSQTTAKNWELTASASHQPPGVYPQGHSDTTVAISTSTVLLCGLSAVSLLACYLKSRQTPPLASVEMEAMEALPVTWGTSSRDEDLENCSHHLRAKRSGSGATNFSLLKQAGDVEENPGP

SEQ ID NO: 216 - skipped

SEQ ID NO: 217 - protein, 558 aa, synthetic construct
NIQNPEPAVYQLKDPRSQDSTLCLFTDFDSQINVPKTMESGTFITDKTVLDMKAMDSKSNGAIAWSNQTSFTCQDIFKETNATYPSSDVPCDATLTEKSFETDMNLNFQNLLVIVLRILLLKVAGFNLLMTLRLWSSRAKRSGSGEGRGSLLTCGDVEENPGPMDWTWILFLVAAATRVHSNWVNVISDLKKIEDLIQSMHIDATLYTESDVHPSCKVTAMKCFLLELQVISLESGDASIHDTVENLIILANNSLSSNGNVTESGCKECEELEEKNIKEFLQSFVHIVQMFINTSSGGGSGGGGSGGGGSGGGGSGGGSLQITCPPPMSVEHADIWVKSYSLYSRERYICNSGFKRKAGTSSLTECVLNKATNVAHWTTPSLKCIRDPALVHQRPAPPSTVTTAGVTPQPESLSPSGKEPAASSPSSNNTAATTAAIVPGSQLMPSKSPSTGTTEISSHESSHGTPSQTTAKNWELTASASHQPPGVYPQGHSDTTVAISTSTVLLCGLSAVSLLACYLKSRQTPPLASVEMEAMEALPVTWGTSSRDEDLENCSHHL

SEQ ID NO: 218 - skipped

SEQ ID NO: 219 - protein, 559 aa, synthetic construct
NIQNPEPAVYQLKDPRSQDSTLCLFTDFDSQINVPKTMESGTFITDKTVLDMKAMDSKSNGAIAWSNQTSFTCQDIFKETNATYPSSDVPCDATLTEKSFETDMNLNFQNLLVIVLRILLLKVAGFNLLMTLRLWSSRAKRSGSGATNFSLLKQAGDVEENPGPMDWTWILFLVAAATRVHSNWVNVISDLKKIEDLIQSMHIDATLYTESDVHPSCKVTAMKCFLLELQVISLESGDASIHDTVENLIILANNSLSSNGNVTESGCKECEELEEKNIKEFLQSFVHIVQMFINTSSGGGSGGGGSGGGGSGGGGSGGGSLQITCPPPMSVEHADIWVKSYSLYSRERYICNSGFKRKAGTSSLTECVLNKATNVAHWTTPSLKCIRDPALVHQRPAPPSTVTTAGVTPQPESLSPSGKEPAASSPSSNNTAATTAAIVPGSQLMPSKSPSTGTTEISSHESSHGTPSQTTAKNWELTASASHQPPGVYPQGHSDTTVAISTSTVLLCGLSAVSLLACYLKSRQTPPLASVEMEAMEALPVTWGTSSRDEDLENCSHHL

SEQ ID NO: 220-229 - skipped (10 entries)

SEQ ID NO: 230 - DNA, 492 bp, synthetic construct
  source 1..492: mol_type = other DNA
  misc_feature 1..3: note = NNN  make up a codon that encodes Asn, Asp, His, or Tyr
  misc_feature 142..144: note = NNN  make up a codon that encodes Thr or Cys
  misc_feature 334..336: note = NNN  make up a codon that encodes Ser, Ala, Val, Leu, Ile, Pro, Phe, Met, or Trp
  misc_feature 340..342: note = NNN  make up a codon that encodes Met, Ala, Val, Leu, Ile, Pro, Phe, or Trp
  misc_feature 343..345: note = NNN  make up a codon that encodes Gly, Ala, Val, Leu, Ile, Pro, Phe, Met, or Trp
nnnatccagaatcccgagcctgcggtgtaccagctgaaggacccccgctctcaggatagcacactgtgcctgttcaccgactttgatagccagatcaacgtgcctaaaacaatggagtccggcaccttcatcaccgacaagnnngtgctggatatgaaagcgatggactccaagtctaacggcgcgatcgcgtggtccaatcagacatctttcacctgccaggatatcttcaaggagacaaacgcgacctatccttcctctgacgtgccatgtgatgcgacactgaccgagaagagcttcgagacagacatgaacctgaattttcagaatctgnnngtcnnnnnnctgagaatcctgctgctgaaggtggcgggctttaatctgctgatgacactgcggctgtggagttcccgggcgaaacgctctggaagcggagcgaccaatttcagcctgctgaagcaggcgggcgatgtggaggagaaccctggccca

SEQ ID NO: 231 - DNA, 597 bp, synthetic construct
  source 1..597: mol_type = other DNA
  misc_feature 169..171: note = NNN  make up a codon that encodes Ser or Cys
gaggacctgaggaacgtgaccccacctaaagtgagcctgttcgagccatccaaggcggagatcgcgaataagcagaaagcgaccctggtgtgcctggcgaggggcttctttcccgatcacgtggagctgtcctggtgggtgaacggcaaagaggtgcactctggcgtgnnnacagaccctcaggcgtacaaggagagcaattactcctattgtctgtctagcagactgagggtgagcgcgaccttttggcacaacccccggaatcacttccgctgccaggtgcagtttcacggcctgtccgaggaggataaatggcctgagggctctccaaagcccgtgacacagaatatcagcgcggaggcgtggggaagagcggactgtggcattacaagcgcgtcctatcagcagggcgtgctgtccgcgaccatcctgtacgagattctgctgggcaaggcgacactgtatgcggtgctggtgtccaccctggtggtcatggcgatggtgaagaggaaaaactctcgggcgaaacgctctggaagcggagagggcagaggaagtcttctaacatgcggtgacgtggaggagaatcccggccct

SEQ ID NO: 232 - DNA, 1782 bp, synthetic construct
  source 1..1782: mol_type = other DNA
  misc_feature 169..171: note = NNN  make up a codon that encodes Ser or Cys
gaggacctgaggaacgtgaccccacctaaagtgagcctgttcgagccatccaaggcggagatcgcgaataagcagaaagcgaccctggtgtgcctggcgaggggcttctttcccgatcacgtggagctgtcctggtgggtgaacggcaaagaggtgcactctggcgtgnnnacagaccctcaggcgtacaaggagagcaattactcctattgtctgtctagcagactgagggtgagcgcgaccttttggcacaacccccggaatcacttccgctgccaggtgcagtttcacggcctgtccgaggaggataaatggcctgagggctctccaaagcccgtgacacagaatatcagcgcggaggcgtggggaagagcggactgtggcattacaagcgcgtcctatcagcagggcgtgctgtccgcgaccatcctgtacgagattctgctgggcaaggcgacactgtatgcggtgctggtgtccaccctggtggtcatggcgatggtgaagaggaaaaactctcgggcgaaacgctctggaagcggagagggcagaggaagtcttctaacatgcggtgacgtggaggagaatcccggccctatggattggacctggattctgtttctggtggccgctgccacaagagtgcacagcaactgggtgaatgtgatcagcgacctgaagaagatcgaggatctgatccagagcatgcacattgatgccaccctgtacacagaatctgatgtgcaccctagctgtaaagtgaccgccatgaagtgttttctgctggagctgcaggtgatttctctggaaagcggagatgcctctatccacgacacagtggagaatctgatcatcctggccaacaatagcctgagcagcaatggcaatgtgacagagtctggctgtaaggagtgtgaggagctggaggagaagaacatcaaggagtttctgcagagctttgtgcacatcgtgcagatgttcatcaatacaagctctggcggaggatctggaggaggcggatctggaggaggaggcagtggaggcggaggatctggcggaggatctctgcagattacatgccctcctccaatgtctgtggagcacgccgatatttgggtgaagtcctacagcctgtacagcagagagagatacatctgcaacagcggctttaagagaaaggccggcacctcttctctgacagagtgcgtgctgaataaggccacaaatgtggcccactggacaacacctagcctgaagtgcattagagatcctgccctggtccaccagaggcctgcccctccatctacagtgacaacagccggagtgacacctcagcctgaatctctgagcccttctggaaaagaacctgccgccagctctcctagctctaataataccgccgccacaacagccgccattgtgcctggatctcagctgatgcctagcaagtctcctagcacaggcacaacagagatcagcagccacgaatcttctcacggaacaccttctcagaccaccgccaagaattgggagctgacagcctctgcctctcaccagcctccaggagtgtatcctcagggccactctgatacaacagtggccatcagcacatctacagtgctgctgtgtggactgtctgccgtgtctctgctggcctgttacctgaagtctagacagacacctcctctggcctctgtggagatggaggccatggaagccctgcctgtgacatggggaacaagcagcagagatgaagacctggagaattgttctcaccacctg

SEQ ID NO: 233 - DNA, 489 bp, synthetic construct
  source 1..489: mol_type = other DNA
  misc_feature 1..3: note = NNN  make up a codon that encodes Asn, Asp, His, or Tyr
  misc_feature 142..144: note = NNN  make up a codon that encodes Thr or Cys
  misc_feature 334..336: note = NNN  make up a codon that encodes Ser, Ala, Val, Leu, Ile, Pro, Phe, Met, or Trp
  misc_feature 340..342: note = NNN  make up a codon that encodes Met, Ala, Val, Leu, Ile, Pro, Phe, or Trp
  misc_feature 343..345: note = NNN  make up a codon that encodes Gly, Ala, Val, Leu, Ile, Pro, Phe, Met, or Trp
nnnatccagaatcccgagcctgcggtgtaccagctgaaggacccccgctctcaggatagcacactgtgcctgttcaccgactttgatagccagatcaacgtgcctaaaacaatggagtccggcaccttcatcaccgacaagnnngtgctggatatgaaagcgatggactccaagtctaacggcgcgatcgcgtggtccaatcagacatctttcacctgccaggatatcttcaaggagacaaacgcgacctatccttcctctgacgtgccatgtgatgcgacactgaccgagaagagcttcgagacagacatgaacctgaattttcagaatctgnnngtcnnnnnnctgagaatcctgctgctgaaggtggcgggctttaatctgctgatgacactgcggctgtggagttcccgggcgaaacgctctggaagcggagagggcagaggaagtcttctaacatgcggtgacgtggaggagaatcccggccct

SEQ ID NO: 234 - DNA, 600 bp, synthetic construct
  source 1..600: mol_type = other DNA
  misc_feature 169..171: note = NNN  make up a codon that encodes Ser or Cys
gaggacctgaggaacgtgaccccacctaaagtgagcctgttcgagccatccaaggcggagatcgcgaataagcagaaagcgaccctggtgtgcctggcgaggggcttctttcccgatcacgtggagctgtcctggtgggtgaacggcaaagaggtgcactctggcgtgnnnacagaccctcaggcgtacaaggagagcaattactcctattgtctgtctagcagactgagggtgagcgcgaccttttggcacaacccccggaatcacttccgctgccaggtgcagtttcacggcctgtccgaggaggataaatggcctgagggctctccaaagcccgtgacacagaatatcagcgcggaggcgtggggaagagcggactgtggcattacaagcgcgtcctatcagcagggcgtgctgtccgcgaccatcctgtacgagattctgctgggcaaggcgacactgtatgcggtgctggtgtccaccctggtggtcatggcgatggtgaagaggaaaaactctcgggcgaaacgctctggaagcggagcgaccaatttcagcctgctgaagcaggcgggcgatgtggaggagaaccctggccca

SEQ ID NO: 235 - DNA, 1785 bp, synthetic construct
  source 1..1785: mol_type = other DNA
  misc_feature 169..171: note = NNN  make up a codon that encodes Ser or Cys
gaggacctgaggaacgtgaccccacctaaagtgagcctgttcgagccatccaaggcggagatcgcgaataagcagaaagcgaccctggtgtgcctggcgaggggcttctttcccgatcacgtggagctgtcctggtgggtgaacggcaaagaggtgcactctggcgtgnnnacagaccctcaggcgtacaaggagagcaattactcctattgtctgtctagcagactgagggtgagcgcgaccttttggcacaacccccggaatcacttccgctgccaggtgcagtttcacggcctgtccgaggaggataaatggcctgagggctctccaaagcccgtgacacagaatatcagcgcggaggcgtggggaagagcggactgtggcattacaagcgcgtcctatcagcagggcgtgctgtccgcgaccatcctgtacgagattctgctgggcaaggcgacactgtatgcggtgctggtgtccaccctggtggtcatggcgatggtgaagaggaaaaactctcgggcgaaacgctctggaagcggagcgaccaatttcagcctgctgaagcaggcgggcgatgtggaggagaaccctggcccaatggattggacctggattctgtttctggtggccgctgccacaagagtgcacagcaactgggtgaatgtgatcagcgacctgaagaagatcgaggatctgatccagagcatgcacattgatgccaccctgtacacagaatctgatgtgcaccctagctgtaaagtgaccgccatgaagtgttttctgctggagctgcaggtgatttctctggaaagcggagatgcctctatccacgacacagtggagaatctgatcatcctggccaacaatagcctgagcagcaatggcaatgtgacagagtctggctgtaaggagtgtgaggagctggaggagaagaacatcaaggagtttctgcagagctttgtgcacatcgtgcagatgttcatcaatacaagctctggcggaggatctggaggaggcggatctggaggaggaggcagtggaggcggaggatctggcggaggatctctgcagattacatgccctcctccaatgtctgtggagcacgccgatatttgggtgaagtcctacagcctgtacagcagagagagatacatctgcaacagcggctttaagagaaaggccggcacctcttctctgacagagtgcgtgctgaataaggccacaaatgtggcccactggacaacacctagcctgaagtgcattagagatcctgccctggtccaccagaggcctgcccctccatctacagtgacaacagccggagtgacacctcagcctgaatctctgagcccttctggaaaagaacctgccgccagctctcctagctctaataataccgccgccacaacagccgccattgtgcctggatctcagctgatgcctagcaagtctcctagcacaggcacaacagagatcagcagccacgaatcttctcacggaacaccttctcagaccaccgccaagaattgggagctgacagcctctgcctctcaccagcctccaggagtgtatcctcagggccactctgatacaacagtggccatcagcacatctacagtgctgctgtgtggactgtctgccgtgtctctgctggcctgttacctgaagtctagacagacacctcctctggcctctgtggagatggaggccatggaagccctgcctgtgacatggggaacaagcagcagagatgaagacctggagaattgttctcaccacctg

SEQ ID NO: 236 - DNA, 1677 bp, synthetic construct
  source 1..1677: mol_type = other DNA
  misc_feature 1..3: note = NNN  make up a codon that encodes Asn, Asp, His, or Tyr
  misc_feature 142..144: note = NNN  make up a codon that encodes Thr or Cys
  misc_feature 334..336: note = NNN  make up a codon that encodes Ser, Ala, Val, Leu, Ile, Pro, Phe, Met, or Trp
  misc_feature 340..342: note = NNN  make up a codon that encodes Met, Ala, Val, Leu, Ile, Pro, Phe, or Trp
  misc_feature 343..345: note = NNN  make up a codon that encodes Gly, Ala, Val, Leu, Ile, Pro, Phe, Met, or Trp
nnnatccagaatcccgagcctgcggtgtaccagctgaaggacccccgctctcaggatagcacactgtgcctgttcaccgactttgatagccagatcaacgtgcctaaaacaatggagtccggcaccttcatcaccgacaagnnngtgctggatatgaaagcgatggactccaagtctaacggcgcgatcgcgtggtccaatcagacatctttcacctgccaggatatcttcaaggagacaaacgcgacctatccttcctctgacgtgccatgtgatgcgacactgaccgagaagagcttcgagacagacatgaacctgaattttcagaatctgnnngtcnnnnnnctgagaatcctgctgctgaaggtggcgggctttaatctgctgatgacactgcggctgtggagttcccgggcgaaacgctctggaagcggagcgaccaatttcagcctgctgaagcaggcgggcgatgtggaggagaaccctggcccaatggattggacctggattctgtttctggtggccgctgccacaagagtgcacagcaactgggtgaatgtgatcagcgacctgaagaagatcgaggatctgatccagagcatgcacattgatgccaccctgtacacagaatctgatgtgcaccctagctgtaaagtgaccgccatgaagtgttttctgctggagctgcaggtgatttctctggaaagcggagatgcctctatccacgacacagtggagaatctgatcatcctggccaacaatagcctgagcagcaatggcaatgtgacagagtctggctgtaaggagtgtgaggagctggaggagaagaacatcaaggagtttctgcagagctttgtgcacatcgtgcagatgttcatcaatacaagctctggcggaggatctggaggaggcggatctggaggaggaggcagtggaggcggaggatctggcggaggatctctgcagattacatgccctcctccaatgtctgtggagcacgccgatatttgggtgaagtcctacagcctgtacagcagagagagatacatctgcaacagcggctttaagagaaaggccggcacctcttctctgacagagtgcgtgctgaataaggccacaaatgtggcccactggacaacacctagcctgaagtgcattagagatcctgccctggtccaccagaggcctgcccctccatctacagtgacaacagccggagtgacacctcagcctgaatctctgagcccttctggaaaagaacctgccgccagctctcctagctctaataataccgccgccacaacagccgccattgtgcctggatctcagctgatgcctagcaagtctcctagcacaggcacaacagagatcagcagccacgaatcttctcacggaacaccttctcagaccaccgccaagaattgggagctgacagcctctgcctctcaccagcctccaggagtgtatcctcagggccactctgatacaacagtggccatcagcacatctacagtgctgctgtgtggactgtctgccgtgtctctgctggcctgttacctgaagtctagacagacacctcctctggcctctgtggagatggaggccatggaagccctgcctgtgacatggggaacaagcagcagagatgaagacctggagaattgttctcaccacctg

SEQ ID NO: 237 - DNA, 1263 bp, synthetic construct
  source 1..1263: mol_type = other DNA
atggattggacctggattctgtttctggtggccgctgccacaagagtgcacagcaactgggtgaatgtgatcagcgacctgaagaagatcgaggatctgatccagagcatgcacattgatgccaccctgtacacagaatctgatgtgcaccctagctgtaaagtgaccgccatgaagtgttttctgctggagctgcaggtgatttctctggaaagcggagatgcctctatccacgacacagtggagaatctgatcatcctggccaacaatagcctgagcagcaatggcaatgtgacagagtctggctgtaaggagtgtgaggagctggaggagaagaacatcaaggagtttctgcagagctttgtgcacatcgtgcagatgttcatcaatacaagctctggcggaggatctggaggaggcggatctggaggaggaggcagtggaggcggaggatctggcggaggatctctgcagattacatgccctcctccaatgtctgtggagcacgccgatatttgggtgaagtcctacagcctgtacagcagagagagatacatctgcaacagcggctttaagagaaaggccggcacctcttctctgacagagtgcgtgctgaataaggccacaaatgtggcccactggacaacacctagcctgaagtgcattagagatcctgccctggtccaccagaggcctgcccctccatctacagtgacaacagccggagtgacacctcagcctgaatctctgagcccttctggaaaagaacctgccgccagctctcctagctctaataataccgccgccacaacagccgccattgtgcctggatctcagctgatgcctagcaagtctcctagcacaggcacaacagagatcagcagccacgaatcttctcacggaacaccttctcagaccaccgccaagaattgggagctgacagcctctgcctctcaccagcctccaggagtgtatcctcagggccactctgatacaacagtggccatcagcacatctacagtgctgctgtgtggactgtctgccgtgtctctgctggcctgttacctgaagtctagacagacacctcctctggcctctgtggagatggaggccatggaagccctgcctgtgacatggggaacaagcagcagagatgaagacctggagaattgttctcaccacctgcgggcgaaacgctctggaagcggagagggcagaggaagtcttctaacatgcggtgacgtggaggagaatcccggccct

SEQ ID NO: 238 - DNA, 1755 bp, synthetic construct
  source 1..1755: mol_type = other DNA
  misc_feature 1..3: note = NNN  make up a codon that encodes Asn, Asp, His, or Tyr
  misc_feature 142..144: note = NNN  make up a codon that encodes Thr or Cys
  misc_feature 334..336: note = NNN  make up a codon that encodes Ser, Ala, Val, Leu, Ile, Pro, Phe, Met, or Trp
  misc_feature 340..342: note = NNN  make up a codon that encodes Met, Ala, Val, Leu, Ile, Pro, Phe, or Trp
  misc_feature 343..345: note = NNN  make up a codon that encodes Gly, Ala, Val, Leu, Ile, Pro, Phe, Met, or Trp
nnnatccagaatcccgagcctgcggtgtaccagctgaaggacccccgctctcaggatagcacactgtgcctgttcaccgactttgatagccagatcaacgtgcctaaaacaatggagtccggcaccttcatcaccgacaagnnngtgctggatatgaaagcgatggactccaagtctaacggcgcgatcgcgtggtccaatcagacatctttcacctgccaggatatcttcaaggagacaaacgcgacctatccttcctctgacgtgccatgtgatgcgacactgaccgagaagagcttcgagacagacatgaacctgaattttcagaatctgnnngtcnnnnnnctgagaatcctgctgctgaaggtggcgggctttaatctgctgatgacactgcggctgtggagttcccgggcgaaacgctctggaagcggagcgaccaatttcagcctgctgaagcaggcgggcgatgtggaggagaaccctggcccaatggattggacctggattctgtttctggtggccgctgccacaagagtgcacagcaactgggtgaatgtgatcagcgacctgaagaagatcgaggatctgatccagagcatgcacattgatgccaccctgtacacagaatctgatgtgcaccctagctgtaaagtgaccgccatgaagtgttttctgctggagctgcaggtgatttctctggaaagcggagatgcctctatccacgacacagtggagaatctgatcatcctggccaacaatagcctgagcagcaatggcaatgtgacagagtctggctgtaaggagtgtgaggagctggaggagaagaacatcaaggagtttctgcagagctttgtgcacatcgtgcagatgttcatcaatacaagctctggcggaggatctggaggaggcggatctggaggaggaggcagtggaggcggaggatctggcggaggatctctgcagattacatgccctcctccaatgtctgtggagcacgccgatatttgggtgaagtcctacagcctgtacagcagagagagatacatctgcaacagcggctttaagagaaaggccggcacctcttctctgacagagtgcgtgctgaataaggccacaaatgtggcccactggacaacacctagcctgaagtgcattagagatcctgccctggtccaccagaggcctgcccctccatctacagtgacaacagccggagtgacacctcagcctgaatctctgagcccttctggaaaagaacctgccgccagctctcctagctctaataataccgccgccacaacagccgccattgtgcctggatctcagctgatgcctagcaagtctcctagcacaggcacaacagagatcagcagccacgaatcttctcacggaacaccttctcagaccaccgccaagaattgggagctgacagcctctgcctctcaccagcctccaggagtgtatcctcagggccactctgatacaacagtggccatcagcacatctacagtgctgctgtgtggactgtctgccgtgtctctgctggcctgttacctgaagtctagacagacacctcctctggcctctgtggagatggaggccatggaagccctgcctgtgacatggggaacaagcagcagagatgaagacctggagaattgttctcaccacctgcgggcgaaacgctctggaagcggagagggcagaggaagtcttctaacatgcggtgacgtggaggagaatcccggccct

SEQ ID NO: 239 - DNA, 1674 bp, synthetic construct
  source 1..1674: mol_type = other DNA
  misc_feature 1..3: note = NNN  make up a codon that encodes Asn, Asp, His, or Tyr
  misc_feature 142..144: note = NNN  make up a codon that encodes Thr or Cys
  misc_feature 334..336: note = NNN  make up a codon that encodes Ser, Ala, Val, Leu, Ile, Pro, Phe, Met, or Trp
  misc_feature 340..342: note = NNN  make up a codon that encodes Met, Ala, Val, Leu, Ile, Pro, Phe, or Trp
  misc_feature 343..345: note = NNN  make up a codon that encodes Gly, Ala, Val, Leu, Ile, Pro, Phe, Met, or Trp
nnnatccagaatcccgagcctgcggtgtaccagctgaaggacccccgctctcaggatagcacactgtgcctgttcaccgactttgatagccagatcaacgtgcctaaaacaatggagtccggcaccttcatcaccgacaagnnngtgctggatatgaaagcgatggactccaagtctaacggcgcgatcgcgtggtccaatcagacatctttcacctgccaggatatcttcaaggagacaaacgcgacctatccttcctctgacgtgccatgtgatgcgacactgaccgagaagagcttcgagacagacatgaacctgaattttcagaatctgnnngtcnnnnnnctgagaatcctgctgctgaaggtggcgggctttaatctgctgatgacactgcggctgtggagttcccgggcgaaacgctctggaagcggagagggcagaggaagtcttctaacatgcggtgacgtggaggagaatcccggccctatggattggacctggattctgtttctggtggccgctgccacaagagtgcacagcaactgggtgaatgtgatcagcgacctgaagaagatcgaggatctgatccagagcatgcacattgatgccaccctgtacacagaatctgatgtgcaccctagctgtaaagtgaccgccatgaagtgttttctgctggagctgcaggtgatttctctggaaagcggagatgcctctatccacgacacagtggagaatctgatcatcctggccaacaatagcctgagcagcaatggcaatgtgacagagtctggctgtaaggagtgtgaggagctggaggagaagaacatcaaggagtttctgcagagctttgtgcacatcgtgcagatgttcatcaatacaagctctggcggaggatctggaggaggcggatctggaggaggaggcagtggaggcggaggatctggcggaggatctctgcagattacatgccctcctccaatgtctgtggagcacgccgatatttgggtgaagtcctacagcctgtacagcagagagagatacatctgcaacagcggctttaagagaaaggccggcacctcttctctgacagagtgcgtgctgaataaggccacaaatgtggcccactggacaacacctagcctgaagtgcattagagatcctgccctggtccaccagaggcctgcccctccatctacagtgacaacagccggagtgacacctcagcctgaatctctgagcccttctggaaaagaacctgccgccagctctcctagctctaataataccgccgccacaacagccgccattgtgcctggatctcagctgatgcctagcaagtctcctagcacaggcacaacagagatcagcagccacgaatcttctcacggaacaccttctcagaccaccgccaagaattgggagctgacagcctctgcctctcaccagcctccaggagtgtatcctcagggccactctgatacaacagtggccatcagcacatctacagtgctgctgtgtggactgtctgccgtgtctctgctggcctgttacctgaagtctagacagacacctcctctggcctctgtggagatggaggccatggaagccctgcctgtgacatggggaacaagcagcagagatgaagacctggagaattgttctcaccacctg

SEQ ID NO: 240 - DNA, 1266 bp, synthetic construct
  source 1..1266: mol_type = other DNA
atggattggacctggattctgtttctggtggccgctgccacaagagtgcacagcaactgggtgaatgtgatcagcgacctgaagaagatcgaggatctgatccagagcatgcacattgatgccaccctgtacacagaatctgatgtgcaccctagctgtaaagtgaccgccatgaagtgttttctgctggagctgcaggtgatttctctggaaagcggagatgcctctatccacgacacagtggagaatctgatcatcctggccaacaatagcctgagcagcaatggcaatgtgacagagtctggctgtaaggagtgtgaggagctggaggagaagaacatcaaggagtttctgcagagctttgtgcacatcgtgcagatgttcatcaatacaagctctggcggaggatctggaggaggcggatctggaggaggaggcagtggaggcggaggatctggcggaggatctctgcagattacatgccctcctccaatgtctgtggagcacgccgatatttgggtgaagtcctacagcctgtacagcagagagagatacatctgcaacagcggctttaagagaaaggccggcacctcttctctgacagagtgcgtgctgaataaggccacaaatgtggcccactggacaacacctagcctgaagtgcattagagatcctgccctggtccaccagaggcctgcccctccatctacagtgacaacagccggagtgacacctcagcctgaatctctgagcccttctggaaaagaacctgccgccagctctcctagctctaataataccgccgccacaacagccgccattgtgcctggatctcagctgatgcctagcaagtctcctagcacaggcacaacagagatcagcagccacgaatcttctcacggaacaccttctcagaccaccgccaagaattgggagctgacagcctctgcctctcaccagcctccaggagtgtatcctcagggccactctgatacaacagtggccatcagcacatctacagtgctgctgtgtggactgtctgccgtgtctctgctggcctgttacctgaagtctagacagacacctcctctggcctctgtggagatggaggccatggaagccctgcctgtgacatggggaacaagcagcagagatgaagacctggagaattgttctcaccacctgcgggcgaaacgctctggaagcggagcgaccaatttcagcctgctgaagcaggcgggcgatgtggaggagaaccctggccca

SEQ ID NO: 241 - DNA, 1755 bp, synthetic construct
  source 1..1755: mol_type = other DNA
  misc_feature 1..3: note = NNN  make up a codon that encodes Asn, Asp, His, or Tyr
  misc_feature 142..144: note = NNN  make up a codon that encodes Thr or Cys
  misc_feature 334..336: note = NNN  make up a codon that encodes Ser, Ala, Val, Leu, Ile, Pro, Phe, Met, or Trp
  misc_feature 340..342: note = NNN  make up a codon that encodes Met, Ala, Val, Leu, Ile, Pro, Phe, or Trp
  misc_feature 343..345: note = NNN  make up a codon that encodes Gly, Ala, Val, Leu, Ile, Pro, Phe, Met, or Trp
nnnatccagaatcccgagcctgcggtgtaccagctgaaggacccccgctctcaggatagcacactgtgcctgttcaccgactttgatagccagatcaacgtgcctaaaacaatggagtccggcaccttcatcaccgacaagnnngtgctggatatgaaagcgatggactccaagtctaacggcgcgatcgcgtggtccaatcagacatctttcacctgccaggatatcttcaaggagacaaacgcgacctatccttcctctgacgtgccatgtgatgcgacactgaccgagaagagcttcgagacagacatgaacctgaattttcagaatctgnnngtcnnnnnnctgagaatcctgctgctgaaggtggcgggctttaatctgctgatgacactgcggctgtggagttcccgggcgaaacgctctggaagcggagagggcagaggaagtcttctaacatgcggtgacgtggaggagaatcccggccctatggattggacctggattctgtttctggtggccgctgccacaagagtgcacagcaactgggtgaatgtgatcagcgacctgaagaagatcgaggatctgatccagagcatgcacattgatgccaccctgtacacagaatctgatgtgcaccctagctgtaaagtgaccgccatgaagtgttttctgctggagctgcaggtgatttctctggaaagcggagatgcctctatccacgacacagtggagaatctgatcatcctggccaacaatagcctgagcagcaatggcaatgtgacagagtctggctgtaaggagtgtgaggagctggaggagaagaacatcaaggagtttctgcagagctttgtgcacatcgtgcagatgttcatcaatacaagctctggcggaggatctggaggaggcggatctggaggaggaggcagtggaggcggaggatctggcggaggatctctgcagattacatgccctcctccaatgtctgtggagcacgccgatatttgggtgaagtcctacagcctgtacagcagagagagatacatctgcaacagcggctttaagagaaaggccggcacctcttctctgacagagtgcgtgctgaataaggccacaaatgtggcccactggacaacacctagcctgaagtgcattagagatcctgccctggtccaccagaggcctgcccctccatctacagtgacaacagccggagtgacacctcagcctgaatctctgagcccttctggaaaagaacctgccgccagctctcctagctctaataataccgccgccacaacagccgccattgtgcctggatctcagctgatgcctagcaagtctcctagcacaggcacaacagagatcagcagccacgaatcttctcacggaacaccttctcagaccaccgccaagaattgggagctgacagcctctgcctctcaccagcctccaggagtgtatcctcagggccactctgatacaacagtggccatcagcacatctacagtgctgctgtgtggactgtctgccgtgtctctgctggcctgttacctgaagtctagacagacacctcctctggcctctgtggagatggaggccatggaagccctgcctgtgacatggggaacaagcagcagagatgaagacctggagaattgttctcaccacctgcgggcgaaacgctctggaagcggagcgaccaatttcagcctgctgaagcaggcgggcgatgtggaggagaaccctggccca

SEQ ID NO: 242 - DNA, 1863 bp, synthetic construct
  source 1..1863: mol_type = other DNA
  misc_feature 169..171: note = NNN make up a codon that encodes Ser or Cys
gaggacctgaggaacgtgaccccacctaaagtgagcctgttcgagccatccaaggcggagatcgcgaataagcagaaagcgaccctggtgtgcctggcgaggggcttctttcccgatcacgtggagctgtcctggtgggtgaacggcaaagaggtgcactctggcgtgnnnacagaccctcaggcgtacaaggagagcaattactcctattgtctgtctagcagactgagggtgagcgcgaccttttggcacaacccccggaatcacttccgctgccaggtgcagtttcacggcctgtccgaggaggataaatggcctgagggctctccaaagcccgtgacacagaatatcagcgcggaggcgtggggaagagcggactgtggcattacaagcgcgtcctatcagcagggcgtgctgtccgcgaccatcctgtacgagattctgctgggcaaggcgacactgtatgcggtgctggtgtccaccctggtggtcatggcgatggtgaagaggaaaaactctcgggcgaaacgctctggaagcggagcgaccaatttcagcctgctgaagcaggcgggcgatgtggaggagaaccctggcccaatggattggacctggattctgtttctggtggccgctgccacaagagtgcacagcaactgggtgaatgtgatcagcgacctgaagaagatcgaggatctgatccagagcatgcacattgatgccaccctgtacacagaatctgatgtgcaccctagctgtaaagtgaccgccatgaagtgttttctgctggagctgcaggtgatttctctggaaagcggagatgcctctatccacgacacagtggagaatctgatcatcctggccaacaatagcctgagcagcaatggcaatgtgacagagtctggctgtaaggagtgtgaggagctggaggagaagaacatcaaggagtttctgcagagctttgtgcacatcgtgcagatgttcatcaatacaagctctggcggaggatctggaggaggcggatctggaggaggaggcagtggaggcggaggatctggcggaggatctctgcagattacatgccctcctccaatgtctgtggagcacgccgatatttgggtgaagtcctacagcctgtacagcagagagagatacatctgcaacagcggctttaagagaaaggccggcacctcttctctgacagagtgcgtgctgaataaggccacaaatgtggcccactggacaacacctagcctgaagtgcattagagatcctgccctggtccaccagaggcctgcccctccatctacagtgacaacagccggagtgacacctcagcctgaatctctgagcccttctggaaaagaacctgccgccagctctcctagctctaataataccgccgccacaacagccgccattgtgcctggatctcagctgatgcctagcaagtctcctagcacaggcacaacagagatcagcagccacgaatcttctcacggaacaccttctcagaccaccgccaagaattgggagctgacagcctctgcctctcaccagcctccaggagtgtatcctcagggccactctgatacaacagtggccatcagcacatctacagtgctgctgtgtggactgtctgccgtgtctctgctggcctgttacctgaagtctagacagacacctcctctggcctctgtggagatggaggccatggaagccctgcctgtgacatggggaacaagcagcagagatgaagacctggagaattgttctcaccacctgcgggcgaaacgctctggaagcggagagggcagaggaagtcttctaacatgcggtgacgtggaggagaatcccggccct

SEQ ID NO: 243 - DNA, 1863 bp, synthetic construct
  source 1..1863: mol_type = other DNA
  misc_feature 169..171: note = NNN  make up a codon that encodes Ser or Cys
gaggacctgaggaacgtgaccccacctaaagtgagcctgttcgagccatccaaggcggagatcgcgaataagcagaaagcgaccctggtgtgcctggcgaggggcttctttcccgatcacgtggagctgtcctggtgggtgaacggcaaagaggtgcactctggcgtgnnnacagaccctcaggcgtacaaggagagcaattactcctattgtctgtctagcagactgagggtgagcgcgaccttttggcacaacccccggaatcacttccgctgccaggtgcagtttcacggcctgtccgaggaggataaatggcctgagggctctccaaagcccgtgacacagaatatcagcgcggaggcgtggggaagagcggactgtggcattacaagcgcgtcctatcagcagggcgtgctgtccgcgaccatcctgtacgagattctgctgggcaaggcgacactgtatgcggtgctggtgtccaccctggtggtcatggcgatggtgaagaggaaaaactctcgggcgaaacgctctggaagcggagagggcagaggaagtcttctaacatgcggtgacgtggaggagaatcccggccctatggattggacctggattctgtttctggtggccgctgccacaagagtgcacagcaactgggtgaatgtgatcagcgacctgaagaagatcgaggatctgatccagagcatgcacattgatgccaccctgtacacagaatctgatgtgcaccctagctgtaaagtgaccgccatgaagtgttttctgctggagctgcaggtgatttctctggaaagcggagatgcctctatccacgacacagtggagaatctgatcatcctggccaacaatagcctgagcagcaatggcaatgtgacagagtctggctgtaaggagtgtgaggagctggaggagaagaacatcaaggagtttctgcagagctttgtgcacatcgtgcagatgttcatcaatacaagctctggcggaggatctggaggaggcggatctggaggaggaggcagtggaggcggaggatctggcggaggatctctgcagattacatgccctcctccaatgtctgtggagcacgccgatatttgggtgaagtcctacagcctgtacagcagagagagatacatctgcaacagcggctttaagagaaaggccggcacctcttctctgacagagtgcgtgctgaataaggccacaaatgtggcccactggacaacacctagcctgaagtgcattagagatcctgccctggtccaccagaggcctgcccctccatctacagtgacaacagccggagtgacacctcagcctgaatctctgagcccttctggaaaagaacctgccgccagctctcctagctctaataataccgccgccacaacagccgccattgtgcctggatctcagctgatgcctagcaagtctcctagcacaggcacaacagagatcagcagccacgaatcttctcacggaacaccttctcagaccaccgccaagaattgggagctgacagcctctgcctctcaccagcctccaggagtgtatcctcagggccactctgatacaacagtggccatcagcacatctacagtgctgctgtgtggactgtctgccgtgtctctgctggcctgttacctgaagtctagacagacacctcctctggcctctgtggagatggaggccatggaagccctgcctgtgacatggggaacaagcagcagagatgaagacctggagaattgttctcaccacctgcgggcgaaacgctctggaagcggagcgaccaatttcagcctgctgaagcaggcgggcgatgtggaggagaaccctggccca

SEQ ID NO: 244-249 - skipped (6 entries)

SEQ ID NO: 250 - DNA, 492 bp, synthetic construct
  source 1..492: mol_type = other DNA
aacatccagaatcccgagcctgcggtgtaccagctgaaggacccccgctctcaggatagcacactgtgcctgttcaccgactttgatagccagatcaacgtgcctaaaacaatggagtccggcaccttcatcaccgacaagtgcgtgctggatatgaaagcgatggactccaagtctaacggcgcgatcgcgtggtccaatcagacatctttcacctgccaggatatcttcaaggagacaaacgcgacctatccttcctctgacgtgccatgtgatgcgacactgaccgagaagagcttcgagacagacatgaacctgaattttcagaatctgctggtcatcgtgctgagaatcctgctgctgaaggtggcgggctttaatctgctgatgacactgcggctgtggagttcccgggcgaaacgctctggaagcggagcgaccaatttcagcctgctgaagcaggcgggcgatgtggaggagaaccctggccca

SEQ ID NO: 251 - DNA, 597 bp, synthetic construct
  source 1..597: mol_type = other DNA
gaggacctgaggaacgtgaccccacctaaagtgagcctgttcgagccatccaaggcggagatcgcgaataagcagaaagcgaccctggtgtgcctggcgaggggcttctttcccgatcacgtggagctgtcctggtgggtgaacggcaaagaggtgcactctggcgtgtgcacagaccctcaggcgtacaaggagagcaattactcctattgtctgtctagcagactgagggtgagcgcgaccttttggcacaacccccggaatcacttccgctgccaggtgcagtttcacggcctgtccgaggaggataaatggcctgagggctctccaaagcccgtgacacagaatatcagcgcggaggcgtggggaagagcggactgtggcattacaagcgcgtcctatcagcagggcgtgctgtccgcgaccatcctgtacgagattctgctgggcaaggcgacactgtatgcggtgctggtgtccaccctggtggtcatggcgatggtgaagaggaaaaactctcgggcgaaacgctctggaagcggagagggcagaggaagtcttctaacatgcggtgacgtggaggagaatcccggccct

SEQ ID NO: 252 - DNA, 1782 bp, synthetic construct
  source 1..1782: mol_type = other DNA
gaggacctgaggaacgtgaccccacctaaagtgagcctgttcgagccatccaaggcggagatcgcgaataagcagaaagcgaccctggtgtgcctggcgaggggcttctttcccgatcacgtggagctgtcctggtgggtgaacggcaaagaggtgcactctggcgtgtgcacagaccctcaggcgtacaaggagagcaattactcctattgtctgtctagcagactgagggtgagcgcgaccttttggcacaacccccggaatcacttccgctgccaggtgcagtttcacggcctgtccgaggaggataaatggcctgagggctctccaaagcccgtgacacagaatatcagcgcggaggcgtggggaagagcggactgtggcattacaagcgcgtcctatcagcagggcgtgctgtccgcgaccatcctgtacgagattctgctgggcaaggcgacactgtatgcggtgctggtgtccaccctggtggtcatggcgatggtgaagaggaaaaactctcgggcgaaacgctctggaagcggagagggcagaggaagtcttctaacatgcggtgacgtggaggagaatcccggccctatggattggacctggattctgtttctggtggccgctgccacaagagtgcacagcaactgggtgaatgtgatcagcgacctgaagaagatcgaggatctgatccagagcatgcacattgatgccaccctgtacacagaatctgatgtgcaccctagctgtaaagtgaccgccatgaagtgttttctgctggagctgcaggtgatttctctggaaagcggagatgcctctatccacgacacagtggagaatctgatcatcctggccaacaatagcctgagcagcaatggcaatgtgacagagtctggctgtaaggagtgtgaggagctggaggagaagaacatcaaggagtttctgcagagctttgtgcacatcgtgcagatgttcatcaatacaagctctggcggaggatctggaggaggcggatctggaggaggaggcagtggaggcggaggatctggcggaggatctctgcagattacatgccctcctccaatgtctgtggagcacgccgatatttgggtgaagtcctacagcctgtacagcagagagagatacatctgcaacagcggctttaagagaaaggccggcacctcttctctgacagagtgcgtgctgaataaggccacaaatgtggcccactggacaacacctagcctgaagtgcattagagatcctgccctggtccaccagaggcctgcccctccatctacagtgacaacagccggagtgacacctcagcctgaatctctgagcccttctggaaaagaacctgccgccagctctcctagctctaataataccgccgccacaacagccgccattgtgcctggatctcagctgatgcctagcaagtctcctagcacaggcacaacagagatcagcagccacgaatcttctcacggaacaccttctcagaccaccgccaagaattgggagctgacagcctctgcctctcaccagcctccaggagtgtatcctcagggccactctgatacaacagtggccatcagcacatctacagtgctgctgtgtggactgtctgccgtgtctctgctggcctgttacctgaagtctagacagacacctcctctggcctctgtggagatggaggccatggaagccctgcctgtgacatggggaacaagcagcagagatgaagacctggagaattgttctcaccacctg

SEQ ID NO: 253 - DNA, 489 bp, synthetic construct
  source 1..489: mol_type = other DNA
aacatccagaatcccgagcctgcggtgtaccagctgaaggacccccgctctcaggatagcacactgtgcctgttcaccgactttgatagccagatcaacgtgcctaaaacaatggagtccggcaccttcatcaccgacaagtgcgtgctggatatgaaagcgatggactccaagtctaacggcgcgatcgcgtggtccaatcagacatctttcacctgccaggatatcttcaaggagacaaacgcgacctatccttcctctgacgtgccatgtgatgcgacactgaccgagaagagcttcgagacagacatgaacctgaattttcagaatctgctggtcatcgtgctgagaatcctgctgctgaaggtggcgggctttaatctgctgatgacactgcggctgtggagttcccgggcgaaacgctctggaagcggagagggcagaggaagtcttctaacatgcggtgacgtggaggagaatcccggccct

SEQ ID NO: 254 - DNA, 600 bp, synthetic construct
  source 1..600: mol_type = other DNA
gaggacctgaggaacgtgaccccacctaaagtgagcctgttcgagccatccaaggcggagatcgcgaataagcagaaagcgaccctggtgtgcctggcgaggggcttctttcccgatcacgtggagctgtcctggtgggtgaacggcaaagaggtgcactctggcgtgtgcacagaccctcaggcgtacaaggagagcaattactcctattgtctgtctagcagactgagggtgagcgcgaccttttggcacaacccccggaatcacttccgctgccaggtgcagtttcacggcctgtccgaggaggataaatggcctgagggctctccaaagcccgtgacacagaatatcagcgcggaggcgtggggaagagcggactgtggcattacaagcgcgtcctatcagcagggcgtgctgtccgcgaccatcctgtacgagattctgctgggcaaggcgacactgtatgcggtgctggtgtccaccctggtggtcatggcgatggtgaagaggaaaaactctcgggcgaaacgctctggaagcggagcgaccaatttcagcctgctgaagcaggcgggcgatgtggaggagaaccctggccca

SEQ ID NO: 255 - DNA, 1785 bp, synthetic construct
  source 1..1785: mol_type = other DNA
gaggacctgaggaacgtgaccccacctaaagtgagcctgttcgagccatccaaggcggagatcgcgaataagcagaaagcgaccctggtgtgcctggcgaggggcttctttcccgatcacgtggagctgtcctggtgggtgaacggcaaagaggtgcactctggcgtgtgcacagaccctcaggcgtacaaggagagcaattactcctattgtctgtctagcagactgagggtgagcgcgaccttttggcacaacccccggaatcacttccgctgccaggtgcagtttcacggcctgtccgaggaggataaatggcctgagggctctccaaagcccgtgacacagaatatcagcgcggaggcgtggggaagagcggactgtggcattacaagcgcgtcctatcagcagggcgtgctgtccgcgaccatcctgtacgagattctgctgggcaaggcgacactgtatgcggtgctggtgtccaccctggtggtcatggcgatggtgaagaggaaaaactctcgggcgaaacgctctggaagcggagcgaccaatttcagcctgctgaagcaggcgggcgatgtggaggagaaccctggcccaatggattggacctggattctgtttctggtggccgctgccacaagagtgcacagcaactgggtgaatgtgatcagcgacctgaagaagatcgaggatctgatccagagcatgcacattgatgccaccctgtacacagaatctgatgtgcaccctagctgtaaagtgaccgccatgaagtgttttctgctggagctgcaggtgatttctctggaaagcggagatgcctctatccacgacacagtggagaatctgatcatcctggccaacaatagcctgagcagcaatggcaatgtgacagagtctggctgtaaggagtgtgaggagctggaggagaagaacatcaaggagtttctgcagagctttgtgcacatcgtgcagatgttcatcaatacaagctctggcggaggatctggaggaggcggatctggaggaggaggcagtggaggcggaggatctggcggaggatctctgcagattacatgccctcctccaatgtctgtggagcacgccgatatttgggtgaagtcctacagcctgtacagcagagagagatacatctgcaacagcggctttaagagaaaggccggcacctcttctctgacagagtgcgtgctgaataaggccacaaatgtggcccactggacaacacctagcctgaagtgcattagagatcctgccctggtccaccagaggcctgcccctccatctacagtgacaacagccggagtgacacctcagcctgaatctctgagcccttctggaaaagaacctgccgccagctctcctagctctaataataccgccgccacaacagccgccattgtgcctggatctcagctgatgcctagcaagtctcctagcacaggcacaacagagatcagcagccacgaatcttctcacggaacaccttctcagaccaccgccaagaattgggagctgacagcctctgcctctcaccagcctccaggagtgtatcctcagggccactctgatacaacagtggccatcagcacatctacagtgctgctgtgtggactgtctgccgtgtctctgctggcctgttacctgaagtctagacagacacctcctctggcctctgtggagatggaggccatggaagccctgcctgtgacatggggaacaagcagcagagatgaagacctggagaattgttctcaccacctg

SEQ ID NO: 256 - DNA, 1677 bp, synthetic construct
  source 1..1677: mol_type = other DNA
aacatccagaatcccgagcctgcggtgtaccagctgaaggacccccgctctcaggatagcacactgtgcctgttcaccgactttgatagccagatcaacgtgcctaaaacaatggagtccggcaccttcatcaccgacaagtgcgtgctggatatgaaagcgatggactccaagtctaacggcgcgatcgcgtggtccaatcagacatctttcacctgccaggatatcttcaaggagacaaacgcgacctatccttcctctgacgtgccatgtgatgcgacactgaccgagaagagcttcgagacagacatgaacctgaattttcagaatctgctggtcatcgtgctgagaatcctgctgctgaaggtggcgggctttaatctgctgatgacactgcggctgtggagttcccgggcgaaacgctctggaagcggagcgaccaatttcagcctgctgaagcaggcgggcgatgtggaggagaaccctggcccaatggattggacctggattctgtttctggtggccgctgccacaagagtgcacagcaactgggtgaatgtgatcagcgacctgaagaagatcgaggatctgatccagagcatgcacattgatgccaccctgtacacagaatctgatgtgcaccctagctgtaaagtgaccgccatgaagtgttttctgctggagctgcaggtgatttctctggaaagcggagatgcctctatccacgacacagtggagaatctgatcatcctggccaacaatagcctgagcagcaatggcaatgtgacagagtctggctgtaaggagtgtgaggagctggaggagaagaacatcaaggagtttctgcagagctttgtgcacatcgtgcagatgttcatcaatacaagctctggcggaggatctggaggaggcggatctggaggaggaggcagtggaggcggaggatctggcggaggatctctgcagattacatgccctcctccaatgtctgtggagcacgccgatatttgggtgaagtcctacagcctgtacagcagagagagatacatctgcaacagcggctttaagagaaaggccggcacctcttctctgacagagtgcgtgctgaataaggccacaaatgtggcccactggacaacacctagcctgaagtgcattagagatcctgccctggtccaccagaggcctgcccctccatctacagtgacaacagccggagtgacacctcagcctgaatctctgagcccttctggaaaagaacctgccgccagctctcctagctctaataataccgccgccacaacagccgccattgtgcctggatctcagctgatgcctagcaagtctcctagcacaggcacaacagagatcagcagccacgaatcttctcacggaacaccttctcagaccaccgccaagaattgggagctgacagcctctgcctctcaccagcctccaggagtgtatcctcagggccactctgatacaacagtggccatcagcacatctacagtgctgctgtgtggactgtctgccgtgtctctgctggcctgttacctgaagtctagacagacacctcctctggcctctgtggagatggaggccatggaagccctgcctgtgacatggggaacaagcagcagagatgaagacctggagaattgttctcaccacctg

SEQ ID NO: 257 - skipped

SEQ ID NO: 258 - DNA, 1755 bp, synthetic construct
  source 1..1755: mol_type = other DNA
aacatccagaatcccgagcctgcggtgtaccagctgaaggacccccgctctcaggatagcacactgtgcctgttcaccgactttgatagccagatcaacgtgcctaaaacaatggagtccggcaccttcatcaccgacaagtgcgtgctggatatgaaagcgatggactccaagtctaacggcgcgatcgcgtggtccaatcagacatctttcacctgccaggatatcttcaaggagacaaacgcgacctatccttcctctgacgtgccatgtgatgcgacactgaccgagaagagcttcgagacagacatgaacctgaattttcagaatctgctggtcatcgtgctgagaatcctgctgctgaaggtggcgggctttaatctgctgatgacactgcggctgtggagttcccgggcgaaacgctctggaagcggagcgaccaatttcagcctgctgaagcaggcgggcgatgtggaggagaaccctggcccaatggattggacctggattctgtttctggtggccgctgccacaagagtgcacagcaactgggtgaatgtgatcagcgacctgaagaagatcgaggatctgatccagagcatgcacattgatgccaccctgtacacagaatctgatgtgcaccctagctgtaaagtgaccgccatgaagtgttttctgctggagctgcaggtgatttctctggaaagcggagatgcctctatccacgacacagtggagaatctgatcatcctggccaacaatagcctgagcagcaatggcaatgtgacagagtctggctgtaaggagtgtgaggagctggaggagaagaacatcaaggagtttctgcagagctttgtgcacatcgtgcagatgttcatcaatacaagctctggcggaggatctggaggaggcggatctggaggaggaggcagtggaggcggaggatctggcggaggatctctgcagattacatgccctcctccaatgtctgtggagcacgccgatatttgggtgaagtcctacagcctgtacagcagagagagatacatctgcaacagcggctttaagagaaaggccggcacctcttctctgacagagtgcgtgctgaataaggccacaaatgtggcccactggacaacacctagcctgaagtgcattagagatcctgccctggtccaccagaggcctgcccctccatctacagtgacaacagccggagtgacacctcagcctgaatctctgagcccttctggaaaagaacctgccgccagctctcctagctctaataataccgccgccacaacagccgccattgtgcctggatctcagctgatgcctagcaagtctcctagcacaggcacaacagagatcagcagccacgaatcttctcacggaacaccttctcagaccaccgccaagaattgggagctgacagcctctgcctctcaccagcctccaggagtgtatcctcagggccactctgatacaacagtggccatcagcacatctacagtgctgctgtgtggactgtctgccgtgtctctgctggcctgttacctgaagtctagacagacacctcctctggcctctgtggagatggaggccatggaagccctgcctgtgacatggggaacaagcagcagagatgaagacctggagaattgttctcaccacctgcgggcgaaacgctctggaagcggagagggcagaggaagtcttctaacatgcggtgacgtggaggagaatcccggccct

SEQ ID NO: 259 - DNA, 1674 bp, synthetic construct
  source 1..1674: mol_type = other DNA
aacatccagaatcccgagcctgcggtgtaccagctgaaggacccccgctctcaggatagcacactgtgcctgttcaccgactttgatagccagatcaacgtgcctaaaacaatggagtccggcaccttcatcaccgacaagtgcgtgctggatatgaaagcgatggactccaagtctaacggcgcgatcgcgtggtccaatcagacatctttcacctgccaggatatcttcaaggagacaaacgcgacctatccttcctctgacgtgccatgtgatgcgacactgaccgagaagagcttcgagacagacatgaacctgaattttcagaatctgctggtcatcgtgctgagaatcctgctgctgaaggtggcgggctttaatctgctgatgacactgcggctgtggagttcccgggcgaaacgctctggaagcggagagggcagaggaagtcttctaacatgcggtgacgtggaggagaatcccggccctatggattggacctggattctgtttctggtggccgctgccacaagagtgcacagcaactgggtgaatgtgatcagcgacctgaagaagatcgaggatctgatccagagcatgcacattgatgccaccctgtacacagaatctgatgtgcaccctagctgtaaagtgaccgccatgaagtgttttctgctggagctgcaggtgatttctctggaaagcggagatgcctctatccacgacacagtggagaatctgatcatcctggccaacaatagcctgagcagcaatggcaatgtgacagagtctggctgtaaggagtgtgaggagctggaggagaagaacatcaaggagtttctgcagagctttgtgcacatcgtgcagatgttcatcaatacaagctctggcggaggatctggaggaggcggatctggaggaggaggcagtggaggcggaggatctggcggaggatctctgcagattacatgccctcctccaatgtctgtggagcacgccgatatttgggtgaagtcctacagcctgtacagcagagagagatacatctgcaacagcggctttaagagaaaggccggcacctcttctctgacagagtgcgtgctgaataaggccacaaatgtggcccactggacaacacctagcctgaagtgcattagagatcctgccctggtccaccagaggcctgcccctccatctacagtgacaacagccggagtgacacctcagcctgaatctctgagcccttctggaaaagaacctgccgccagctctcctagctctaataataccgccgccacaacagccgccattgtgcctggatctcagctgatgcctagcaagtctcctagcacaggcacaacagagatcagcagccacgaatcttctcacggaacaccttctcagaccaccgccaagaattgggagctgacagcctctgcctctcaccagcctccaggagtgtatcctcagggccactctgatacaacagtggccatcagcacatctacagtgctgctgtgtggactgtctgccgtgtctctgctggcctgttacctgaagtctagacagacacctcctctggcctctgtggagatggaggccatggaagccctgcctgtgacatggggaacaagcagcagagatgaagacctggagaattgttctcaccacctg

SEQ ID NO: 260 - skipped

SEQ ID NO: 261 - DNA, 1755 bp, synthetic construct
  source 1..1755: mol_type = other DNA
aacatccagaatcccgagcctgcggtgtaccagctgaaggacccccgctctcaggatagcacactgtgcctgttcaccgactttgatagccagatcaacgtgcctaaaacaatggagtccggcaccttcatcaccgacaagtgcgtgctggatatgaaagcgatggactccaagtctaacggcgcgatcgcgtggtccaatcagacatctttcacctgccaggatatcttcaaggagacaaacgcgacctatccttcctctgacgtgccatgtgatgcgacactgaccgagaagagcttcgagacagacatgaacctgaattttcagaatctgctggtcatcgtgctgagaatcctgctgctgaaggtggcgggctttaatctgctgatgacactgcggctgtggagttcccgggcgaaacgctctggaagcggagagggcagaggaagtcttctaacatgcggtgacgtggaggagaatcccggccctatggattggacctggattctgtttctggtggccgctgccacaagagtgcacagcaactgggtgaatgtgatcagcgacctgaagaagatcgaggatctgatccagagcatgcacattgatgccaccctgtacacagaatctgatgtgcaccctagctgtaaagtgaccgccatgaagtgttttctgctggagctgcaggtgatttctctggaaagcggagatgcctctatccacgacacagtggagaatctgatcatcctggccaacaatagcctgagcagcaatggcaatgtgacagagtctggctgtaaggagtgtgaggagctggaggagaagaacatcaaggagtttctgcagagctttgtgcacatcgtgcagatgttcatcaatacaagctctggcggaggatctggaggaggcggatctggaggaggaggcagtggaggcggaggatctggcggaggatctctgcagattacatgccctcctccaatgtctgtggagcacgccgatatttgggtgaagtcctacagcctgtacagcagagagagatacatctgcaacagcggctttaagagaaaggccggcacctcttctctgacagagtgcgtgctgaataaggccacaaatgtggcccactggacaacacctagcctgaagtgcattagagatcctgccctggtccaccagaggcctgcccctccatctacagtgacaacagccggagtgacacctcagcctgaatctctgagcccttctggaaaagaacctgccgccagctctcctagctctaataataccgccgccacaacagccgccattgtgcctggatctcagctgatgcctagcaagtctcctagcacaggcacaacagagatcagcagccacgaatcttctcacggaacaccttctcagaccaccgccaagaattgggagctgacagcctctgcctctcaccagcctccaggagtgtatcctcagggccactctgatacaacagtggccatcagcacatctacagtgctgctgtgtggactgtctgccgtgtctctgctggcctgttacctgaagtctagacagacacctcctctggcctctgtggagatggaggccatggaagccctgcctgtgacatggggaacaagcagcagagatgaagacctggagaattgttctcaccacctgcgggcgaaacgctctggaagcggagcgaccaatttcagcctgctgaagcaggcgggcgatgtggaggagaaccctggccca

SEQ ID NO: 262 - DNA, 1863 bp, synthetic construct
  source 1..1863: mol_type = other DNA
gaggacctgaggaacgtgaccccacctaaagtgagcctgttcgagccatccaaggcggagatcgcgaataagcagaaagcgaccctggtgtgcctggcgaggggcttctttcccgatcacgtggagctgtcctggtgggtgaacggcaaagaggtgcactctggcgtgtgcacagaccctcaggcgtacaaggagagcaattactcctattgtctgtctagcagactgagggtgagcgcgaccttttggcacaacccccggaatcacttccgctgccaggtgcagtttcacggcctgtccgaggaggataaatggcctgagggctctccaaagcccgtgacacagaatatcagcgcggaggcgtggggaagagcggactgtggcattacaagcgcgtcctatcagcagggcgtgctgtccgcgaccatcctgtacgagattctgctgggcaaggcgacactgtatgcggtgctggtgtccaccctggtggtcatggcgatggtgaagaggaaaaactctcgggcgaaacgctctggaagcggagcgaccaatttcagcctgctgaagcaggcgggcgatgtggaggagaaccctggcccaatggattggacctggattctgtttctggtggccgctgccacaagagtgcacagcaactgggtgaatgtgatcagcgacctgaagaagatcgaggatctgatccagagcatgcacattgatgccaccctgtacacagaatctgatgtgcaccctagctgtaaagtgaccgccatgaagtgttttctgctggagctgcaggtgatttctctggaaagcggagatgcctctatccacgacacagtggagaatctgatcatcctggccaacaatagcctgagcagcaatggcaatgtgacagagtctggctgtaaggagtgtgaggagctggaggagaagaacatcaaggagtttctgcagagctttgtgcacatcgtgcagatgttcatcaatacaagctctggcggaggatctggaggaggcggatctggaggaggaggcagtggaggcggaggatctggcggaggatctctgcagattacatgccctcctccaatgtctgtggagcacgccgatatttgggtgaagtcctacagcctgtacagcagagagagatacatctgcaacagcggctttaagagaaaggccggcacctcttctctgacagagtgcgtgctgaataaggccacaaatgtggcccactggacaacacctagcctgaagtgcattagagatcctgccctggtccaccagaggcctgcccctccatctacagtgacaacagccggagtgacacctcagcctgaatctctgagcccttctggaaaagaacctgccgccagctctcctagctctaataataccgccgccacaacagccgccattgtgcctggatctcagctgatgcctagcaagtctcctagcacaggcacaacagagatcagcagccacgaatcttctcacggaacaccttctcagaccaccgccaagaattgggagctgacagcctctgcctctcaccagcctccaggagtgtatcctcagggccactctgatacaacagtggccatcagcacatctacagtgctgctgtgtggactgtctgccgtgtctctgctggcctgttacctgaagtctagacagacacctcctctggcctctgtggagatggaggccatggaagccctgcctgtgacatggggaacaagcagcagagatgaagacctggagaattgttctcaccacctgcgggcgaaacgctctggaagcggagagggcagaggaagtcttctaacatgcggtgacgtggaggagaatcccggccct

SEQ ID NO: 263 - DNA, 1863 bp, synthetic construct
  source 1..1863: mol_type = other DNA
gaggacctgaggaacgtgaccccacctaaagtgagcctgttcgagccatccaaggcggagatcgcgaataagcagaaagcgaccctggtgtgcctggcgaggggcttctttcccgatcacgtggagctgtcctggtgggtgaacggcaaagaggtgcactctggcgtgtgcacagaccctcaggcgtacaaggagagcaattactcctattgtctgtctagcagactgagggtgagcgcgaccttttggcacaacccccggaatcacttccgctgccaggtgcagtttcacggcctgtccgaggaggataaatggcctgagggctctccaaagcccgtgacacagaatatcagcgcggaggcgtggggaagagcggactgtggcattacaagcgcgtcctatcagcagggcgtgctgtccgcgaccatcctgtacgagattctgctgggcaaggcgacactgtatgcggtgctggtgtccaccctggtggtcatggcgatggtgaagaggaaaaactctcgggcgaaacgctctggaagcggagagggcagaggaagtcttctaacatgcggtgacgtggaggagaatcccggccctatggattggacctggattctgtttctggtggccgctgccacaagagtgcacagcaactgggtgaatgtgatcagcgacctgaagaagatcgaggatctgatccagagcatgcacattgatgccaccctgtacacagaatctgatgtgcaccctagctgtaaagtgaccgccatgaagtgttttctgctggagctgcaggtgatttctctggaaagcggagatgcctctatccacgacacagtggagaatctgatcatcctggccaacaatagcctgagcagcaatggcaatgtgacagagtctggctgtaaggagtgtgaggagctggaggagaagaacatcaaggagtttctgcagagctttgtgcacatcgtgcagatgttcatcaatacaagctctggcggaggatctggaggaggcggatctggaggaggaggcagtggaggcggaggatctggcggaggatctctgcagattacatgccctcctccaatgtctgtggagcacgccgatatttgggtgaagtcctacagcctgtacagcagagagagatacatctgcaacagcggctttaagagaaaggccggcacctcttctctgacagagtgcgtgctgaataaggccacaaatgtggcccactggacaacacctagcctgaagtgcattagagatcctgccctggtccaccagaggcctgcccctccatctacagtgacaacagccggagtgacacctcagcctgaatctctgagcccttctggaaaagaacctgccgccagctctcctagctctaataataccgccgccacaacagccgccattgtgcctggatctcagctgatgcctagcaagtctcctagcacaggcacaacagagatcagcagccacgaatcttctcacggaacaccttctcagaccaccgccaagaattgggagctgacagcctctgcctctcaccagcctccaggagtgtatcctcagggccactctgatacaacagtggccatcagcacatctacagtgctgctgtgtggactgtctgccgtgtctctgctggcctgttacctgaagtctagacagacacctcctctggcctctgtggagatggaggccatggaagccctgcctgtgacatggggaacaagcagcagagatgaagacctggagaattgttctcaccacctgcgggcgaaacgctctggaagcggagcgaccaatttcagcctgctgaagcaggcgggcgatgtggaggagaaccctggccca

SEQ ID NO: 264-269 - skipped (6 entries)

SEQ ID NO: 270 - DNA, 492 bp, synthetic construct
  source 1..492: mol_type = other DNA
aacatccagaatcccgagcctgcggtgtaccagctgaaggacccccgctctcaggatagcacactgtgcctgttcaccgactttgatagccagatcaacgtgcctaaaacaatggagtccggcaccttcatcaccgacaagaccgtgctggatatgaaagcgatggactccaagtctaacggcgcgatcgcgtggtccaatcagacatctttcacctgccaggatatcttcaaggagacaaacgcgacctatccttcctctgacgtgccatgtgatgcgacactgaccgagaagagcttcgagacagacatgaacctgaattttcagaatctgctggtcatcgtgctgagaatcctgctgctgaaggtggcgggctttaatctgctgatgacactgcggctgtggagttcccgggcgaaacgctctggaagcggagcgaccaatttcagcctgctgaagcaggcgggcgatgtggaggagaaccctggccca

SEQ ID NO: 271-272 - skipped (2 entries)

SEQ ID NO: 273 - DNA, 489 bp, synthetic construct
  source 1..489: mol_type = other DNA
aacatccagaatcccgagcctgcggtgtaccagctgaaggacccccgctctcaggatagcacactgtgcctgttcaccgactttgatagccagatcaacgtgcctaaaacaatggagtccggcaccttcatcaccgacaagaccgtgctggatatgaaagcgatggactccaagtctaacggcgcgatcgcgtggtccaatcagacatctttcacctgccaggatatcttcaaggagacaaacgcgacctatccttcctctgacgtgccatgtgatgcgacactgaccgagaagagcttcgagacagacatgaacctgaattttcagaatctgctggtcatcgtgctgagaatcctgctgctgaaggtggcgggctttaatctgctgatgacactgcggctgtggagttcccgggcgaaacgctctggaagcggagagggcagaggaagtcttctaacatgcggtgacgtggaggagaatcccggccct

SEQ ID NO: 274-275 - skipped (2 entries)

SEQ ID NO: 276 - DNA, 1677 bp, synthetic construct
  source 1..1677: mol_type = other DNA
aacatccagaatcccgagcctgcggtgtaccagctgaaggacccccgctctcaggatagcacactgtgcctgttcaccgactttgatagccagatcaacgtgcctaaaacaatggagtccggcaccttcatcaccgacaagaccgtgctggatatgaaagcgatggactccaagtctaacggcgcgatcgcgtggtccaatcagacatctttcacctgccaggatatcttcaaggagacaaacgcgacctatccttcctctgacgtgccatgtgatgcgacactgaccgagaagagcttcgagacagacatgaacctgaattttcagaatctgctggtcatcgtgctgagaatcctgctgctgaaggtggcgggctttaatctgctgatgacactgcggctgtggagttcccgggcgaaacgctctggaagcggagcgaccaatttcagcctgctgaagcaggcgggcgatgtggaggagaaccctggcccaatggattggacctggattctgtttctggtggccgctgccacaagagtgcacagcaactgggtgaatgtgatcagcgacctgaagaagatcgaggatctgatccagagcatgcacattgatgccaccctgtacacagaatctgatgtgcaccctagctgtaaagtgaccgccatgaagtgttttctgctggagctgcaggtgatttctctggaaagcggagatgcctctatccacgacacagtggagaatctgatcatcctggccaacaatagcctgagcagcaatggcaatgtgacagagtctggctgtaaggagtgtgaggagctggaggagaagaacatcaaggagtttctgcagagctttgtgcacatcgtgcagatgttcatcaatacaagctctggcggaggatctggaggaggcggatctggaggaggaggcagtggaggcggaggatctggcggaggatctctgcagattacatgccctcctccaatgtctgtggagcacgccgatatttgggtgaagtcctacagcctgtacagcagagagagatacatctgcaacagcggctttaagagaaaggccggcacctcttctctgacagagtgcgtgctgaataaggccacaaatgtggcccactggacaacacctagcctgaagtgcattagagatcctgccctggtccaccagaggcctgcccctccatctacagtgacaacagccggagtgacacctcagcctgaatctctgagcccttctggaaaagaacctgccgccagctctcctagctctaataataccgccgccacaacagccgccattgtgcctggatctcagctgatgcctagcaagtctcctagcacaggcacaacagagatcagcagccacgaatcttctcacggaacaccttctcagaccaccgccaagaattgggagctgacagcctctgcctctcaccagcctccaggagtgtatcctcagggccactctgatacaacagtggccatcagcacatctacagtgctgctgtgtggactgtctgccgtgtctctgctggcctgttacctgaagtctagacagacacctcctctggcctctgtggagatggaggccatggaagccctgcctgtgacatggggaacaagcagcagagatgaagacctggagaattgttctcaccacctg

SEQ ID NO: 277 - skipped

SEQ ID NO: 278 - DNA, 1755 bp, synthetic construct
  source 1..1755: mol_type = other DNA
aacatccagaatcccgagcctgcggtgtaccagctgaaggacccccgctctcaggatagcacactgtgcctgttcaccgactttgatagccagatcaacgtgcctaaaacaatggagtccggcaccttcatcaccgacaagaccgtgctggatatgaaagcgatggactccaagtctaacggcgcgatcgcgtggtccaatcagacatctttcacctgccaggatatcttcaaggagacaaacgcgacctatccttcctctgacgtgccatgtgatgcgacactgaccgagaagagcttcgagacagacatgaacctgaattttcagaatctgctggtcatcgtgctgagaatcctgctgctgaaggtggcgggctttaatctgctgatgacactgcggctgtggagttcccgggcgaaacgctctggaagcggagcgaccaatttcagcctgctgaagcaggcgggcgatgtggaggagaaccctggcccaatggattggacctggattctgtttctggtggccgctgccacaagagtgcacagcaactgggtgaatgtgatcagcgacctgaagaagatcgaggatctgatccagagcatgcacattgatgccaccctgtacacagaatctgatgtgcaccctagctgtaaagtgaccgccatgaagtgttttctgctggagctgcaggtgatttctctggaaagcggagatgcctctatccacgacacagtggagaatctgatcatcctggccaacaatagcctgagcagcaatggcaatgtgacagagtctggctgtaaggagtgtgaggagctggaggagaagaacatcaaggagtttctgcagagctttgtgcacatcgtgcagatgttcatcaatacaagctctggcggaggatctggaggaggcggatctggaggaggaggcagtggaggcggaggatctggcggaggatctctgcagattacatgccctcctccaatgtctgtggagcacgccgatatttgggtgaagtcctacagcctgtacagcagagagagatacatctgcaacagcggctttaagagaaaggccggcacctcttctctgacagagtgcgtgctgaataaggccacaaatgtggcccactggacaacacctagcctgaagtgcattagagatcctgccctggtccaccagaggcctgcccctccatctacagtgacaacagccggagtgacacctcagcctgaatctctgagcccttctggaaaagaacctgccgccagctctcctagctctaataataccgccgccacaacagccgccattgtgcctggatctcagctgatgcctagcaagtctcctagcacaggcacaacagagatcagcagccacgaatcttctcacggaacaccttctcagaccaccgccaagaattgggagctgacagcctctgcctctcaccagcctccaggagtgtatcctcagggccactctgatacaacagtggccatcagcacatctacagtgctgctgtgtggactgtctgccgtgtctctgctggcctgttacctgaagtctagacagacacctcctctggcctctgtggagatggaggccatggaagccctgcctgtgacatggggaacaagcagcagagatgaagacctggagaattgttctcaccacctgcgggcgaaacgctctggaagcggagagggcagaggaagtcttctaacatgcggtgacgtggaggagaatcccggccct

SEQ ID NO: 279 - DNA, 1674 bp, synthetic construct
  source 1..1674: mol_type = other DNA
aacatccagaatcccgagcctgcggtgtaccagctgaaggacccccgctctcaggatagcacactgtgcctgttcaccgactttgatagccagatcaacgtgcctaaaacaatggagtccggcaccttcatcaccgacaagaccgtgctggatatgaaagcgatggactccaagtctaacggcgcgatcgcgtggtccaatcagacatctttcacctgccaggatatcttcaaggagacaaacgcgacctatccttcctctgacgtgccatgtgatgcgacactgaccgagaagagcttcgagacagacatgaacctgaattttcagaatctgctggtcatcgtgctgagaatcctgctgctgaaggtggcgggctttaatctgctgatgacactgcggctgtggagttcccgggcgaaacgctctggaagcggagagggcagaggaagtcttctaacatgcggtgacgtggaggagaatcccggccctatggattggacctggattctgtttctggtggccgctgccacaagagtgcacagcaactgggtgaatgtgatcagcgacctgaagaagatcgaggatctgatccagagcatgcacattgatgccaccctgtacacagaatctgatgtgcaccctagctgtaaagtgaccgccatgaagtgttttctgctggagctgcaggtgatttctctggaaagcggagatgcctctatccacgacacagtggagaatctgatcatcctggccaacaatagcctgagcagcaatggcaatgtgacagagtctggctgtaaggagtgtgaggagctggaggagaagaacatcaaggagtttctgcagagctttgtgcacatcgtgcagatgttcatcaatacaagctctggcggaggatctggaggaggcggatctggaggaggaggcagtggaggcggaggatctggcggaggatctctgcagattacatgccctcctccaatgtctgtggagcacgccgatatttgggtgaagtcctacagcctgtacagcagagagagatacatctgcaacagcggctttaagagaaaggccggcacctcttctctgacagagtgcgtgctgaataaggccacaaatgtggcccactggacaacacctagcctgaagtgcattagagatcctgccctggtccaccagaggcctgcccctccatctacagtgacaacagccggagtgacacctcagcctgaatctctgagcccttctggaaaagaacctgccgccagctctcctagctctaataataccgccgccacaacagccgccattgtgcctggatctcagctgatgcctagcaagtctcctagcacaggcacaacagagatcagcagccacgaatcttctcacggaacaccttctcagaccaccgccaagaattgggagctgacagcctctgcctctcaccagcctccaggagtgtatcctcagggccactctgatacaacagtggccatcagcacatctacagtgctgctgtgtggactgtctgccgtgtctctgctggcctgttacctgaagtctagacagacacctcctctggcctctgtggagatggaggccatggaagccctgcctgtgacatggggaacaagcagcagagatgaagacctggagaattgttctcaccacctg

SEQ ID NO: 280 - skipped

SEQ ID NO: 281 - DNA, 1755 bp, synthetic construct
  source 1..1755: mol_type = other DNA
aacatccagaatcccgagcctgcggtgtaccagctgaaggacccccgctctcaggatagcacactgtgcctgttcaccgactttgatagccagatcaacgtgcctaaaacaatggagtccggcaccttcatcaccgacaagaccgtgctggatatgaaagcgatggactccaagtctaacggcgcgatcgcgtggtccaatcagacatctttcacctgccaggatatcttcaaggagacaaacgcgacctatccttcctctgacgtgccatgtgatgcgacactgaccgagaagagcttcgagacagacatgaacctgaattttcagaatctgctggtcatcgtgctgagaatcctgctgctgaaggtggcgggctttaatctgctgatgacactgcggctgtggagttcccgggcgaaacgctctggaagcggagagggcagaggaagtcttctaacatgcggtgacgtggaggagaatcccggccctatggattggacctggattctgtttctggtggccgctgccacaagagtgcacagcaactgggtgaatgtgatcagcgacctgaagaagatcgaggatctgatccagagcatgcacattgatgccaccctgtacacagaatctgatgtgcaccctagctgtaaagtgaccgccatgaagtgttttctgctggagctgcaggtgatttctctggaaagcggagatgcctctatccacgacacagtggagaatctgatcatcctggccaacaatagcctgagcagcaatggcaatgtgacagagtctggctgtaaggagtgtgaggagctggaggagaagaacatcaaggagtttctgcagagctttgtgcacatcgtgcagatgttcatcaatacaagctctggcggaggatctggaggaggcggatctggaggaggaggcagtggaggcggaggatctggcggaggatctctgcagattacatgccctcctccaatgtctgtggagcacgccgatatttgggtgaagtcctacagcctgtacagcagagagagatacatctgcaacagcggctttaagagaaaggccggcacctcttctctgacagagtgcgtgctgaataaggccacaaatgtggcccactggacaacacctagcctgaagtgcattagagatcctgccctggtccaccagaggcctgcccctccatctacagtgacaacagccggagtgacacctcagcctgaatctctgagcccttctggaaaagaacctgccgccagctctcctagctctaataataccgccgccacaacagccgccattgtgcctggatctcagctgatgcctagcaagtctcctagcacaggcacaacagagatcagcagccacgaatcttctcacggaacaccttctcagaccaccgccaagaattgggagctgacagcctctgcctctcaccagcctccaggagtgtatcctcagggccactctgatacaacagtggccatcagcacatctacagtgctgctgtgtggactgtctgccgtgtctctgctggcctgttacctgaagtctagacagacacctcctctggcctctgtggagatggaggccatggaagccctgcctgtgacatggggaacaagcagcagagatgaagacctggagaattgttctcaccacctgcgggcgaaacgctctggaagcggagcgaccaatttcagcctgctgaagcaggcgggcgatgtggaggagaaccctggccca

SEQ ID NO: 282-289 - skipped (8 entries)

SEQ ID NO: 290 - DNA, 226 bp, synthetic construct
  source 1..226: mol_type = other DNA
agttgaagtcggaagtttacatacacttaagttggagtcattaaaactcgtttttcaactactccacaaatttcttgttaacaaacaatagttttggcaagtcagttaggacatctactttgtgcatgacacaagtcatttttccaacaattgtttacagacagattatttcacttataattcactgtatcacaattccagtgggtcagaagtttacatacactaa

SEQ ID NO: 291 - DNA, 246 bp, synthetic construct
  source 1..246: mol_type = other DNA
atatcaattgagttgaagtcggaagtttacatacacttaagttggagtcattaaaactcgtttttcaactacaccacaaatttcttgttaacaaacaatagttttggcaagtcagttaggacatctactttgtgcatgacacaagtcatttttccaacaattgtttacagacagattatttcacttataattcactgtatcacaattccagtgggtcagaagtttacatacactaacaattgatat

SEQ ID NO: 292 - DNA, 228 bp, synthetic construct
  source 1..228: mol_type = other DNA
ttgagtgtatgtaaacttctgacccactgggaatgtgatgaaagaaataaaagctgaaatgaatcattctctctactattattctgatatttcacattcttaaaataaagtggtgatcctaactgacctaagacagggaatttttactaggattaaatgtcaggaattgtgaaaaagtgagtttaaatgtatttggctaaggtgtatgtaaacttccgacttcaactg

SEQ ID NO: 293 - DNA, 228 bp, synthetic construct
  source 1..228: mol_type = other DNA
ttgagtgtatgttaacttctgacccactgggaatgtgatgaaagaaataaaagctgaaatgaatcattctctctactattattctgatatttcacattcttaaaataaagtggtgatcctaactgaccttaagacagggaatctttactcggattaaatgtcaggaattgtgaaaaagtgagtttaaatgtatttggctaaggtgtatgtaaacttccgacttcaact

SEQ ID NO: 294 - DNA, 248 bp, synthetic construct
  source 1..248: mol_type = other DNA
atatctcgagttgagtgtatgttaacttctgacccactgggaatgtgatgaaagaaataaaagctgaaatgaatcattctctctactattattctgatatttcacattcttaaaataaagtggtgatcctaactgaccttaagacagggaatctttactcggattaaatgtcaggaattgtgaaaaagtgagtttaaatgtatttggctaaggtgtatgtaaacttccgacttcaactctcgagatat

SEQ ID NO: 295 - DNA, 229 bp, synthetic construct
  source 1..229: mol_type = other DNA
tacagttgaagtcggaagtttacatacacttaagttggagtcattaaaactcgtttttcaactactccacaaatttcttgttaacaaacaatagttttggcaagtcagttaggacatctactttgtgcatgacacaagtcatttttccaacaattgtttacagacagattatttcacttataattcactgtatcacaattccagtgggtcagaagtttacatacactaa

SEQ ID NO: 296 - DNA, 230 bp, synthetic construct
  source 1..230: mol_type = other DNA
ttgagtgtatgtaaacttctgacccactgggaatgtgatgaaagaaataaaagctgaaatgaatcattctctctactattattctgatatttcacattcttaaaataaagtggtgatcctaactgacctaagacagggaatttttactaggattaaatgtcaggaattgtgaaaaagtgagtttaaatgtatttggctaaggtgtatgtaaacttccgacttcaactgta

SEQ ID NO: 297 - DNA, 231 bp, synthetic construct
  source 1..231: mol_type = other DNA
ttgagtgtatgttaacttctgacccactgggaatgtgatgaaagaaataaaagctgaaatgaatcattctctctactattattctgatatttcacattcttaaaataaagtggtgatcctaactgaccttaagacagggaatctttactcggattaaatgtcaggaattgtgaaaaagtgagtttaaatgtatttggctaaggtgtatgtaaacttccgacttcaactgta

SEQ ID NO: 298-299 - skipped (2 entries)

SEQ ID NO: 300 - protein, 340 aa, synthetic construct
MGKSKEISQDLRKKIVDLHKSGSSLGAISKRLKVPRSSVQTIVRKYKHHGTTQPSYRSGRRRVLSPRDERTLVRKVQINPRTTAKDLVKMLEETGTKVSISTVKRVLYRHNLKGRSARKKPLLQNRHKKARLRFARAHGDKDRTFWRNVLWSDETKIELFGHNDHRYVWRKKGEACKPKNTIPTVKHGGGSIMLWGCFAAGGTGALHKIDGIMRKENYVDILKQHLKTSVRKLKLGRKWVFQQDNDPKHTSKHVRKWLKDNKVKVLEWPSQSPDLNPIENLWAELKKRVRARRPTNLTQLHQLCQEEWAKIHPTYCGKLVEGYPKRLTQVKQFKGNATKY

SEQ ID NO: 301 - DNA, 1020 bp, synthetic construct
  source 1..1020: mol_type = other DNA
atgggaaaatcaaaagaaatcagccaagacctcagaaaaaaaattgtagacctccacaagtctggttcatccttgggagcaatttccaaacgcctgaaagtaccacgttcatctgtacaaacaatagtacgcaagtataaacaccatgggaccacgcagccgtcataccgctcaggaaggagacgcgttctgtctcctagagatgaacgtactttggtgcgaaaagtgcaaatcaatcccagaacaacagcaaaggaccttgtgaagatgctggaggaaacaggtacaaaagtatctatatccacagtaaaacgagtcctatatcgacataacctgaaaggccgctcagcaaggaagaagccactgctccaaaaccgacataagaaagccagactacggtttgcaagagcacatggggacaaagatcgtactttttggagaaatgtcctctggtctgatgaaacaaaaatagaactgtttggccataatgaccatcgttatgtttggaggaagaagggggaggcttgcaagccgaagaacaccatcccaaccgtgaagcacgggggtggcagcatcatgttgtgggggtgctttgctgcaggagggactggtgcacttcacaaaatagatggcatcatgaggaaggaaaattatgtggatatattgaagcaacatctcaagacatcagtcaggaagttaaagcttggtcgcaaatgggtcttccaacaagacaatgaccccaagcatacttccaaacacgtgagaaaatggcttaaggacaacaaagtcaaggtattggagtggccatcacaaagccctgacctcaatcctatagaaaatttgtgggcagaactgaaaaagcgtgtgcgagcaaggaggcctacaaacctgactcagttacaccagctctgtcaggaggaatgggccaaaattcacccaacttattgtgggaagcttgtggaaggctacccgaaacgtttgacccaagttaaacaatttaaaggcaatgctaccaaatac

SEQ ID NO: 302-319 - skipped (18 entries)

SEQ ID NO: 320 - DNA, 3069 bp, synthetic construct
  source 1..3069: mol_type = other DNA
atggagtcctttctgggcggcgtgctgctgatcctgtggctgcaggtggactgggtgaaatcccagaagatcgagcagaactctgaggcgctgaatattcaggagggcaagaccgcgacactgacctgcaactacacaaattattccccagcgtacctgcagtggtataggcaggacccaggcaggggacccgtgtttctgctgctgattcgggagaatgagaaggagaaaagaaaggagaggctgaaagtgaccttcgataccacactgaagcagtctctgtttcacatcacagcgtctcagccagcggacagcgcgacctacctgtgcgcgctggacatctaccctcacgatatgagattcggcgcgggcacaaggctgaccgtgaaaccaaacatccagaatcccgagcctgcggtgtaccagctgaaggacccccgctctcaggatagcacactgtgcctgttcaccgactttgatagccagatcaacgtgcctaaaacaatggagtccggcaccttcatcaccgacaagtgcgtgctggatatgaaagcgatggactccaagtctaacggcgcgatcgcgtggtccaatcagacatctttcacctgccaggatatcttcaaggagacaaacgcgacctatccttcctctgacgtgccatgtgatgcgacactgaccgagaagagcttcgagacagacatgaacctgaattttcagaatctgctggtcatcgtgctgagaatcctgctgctgaaggtggcgggctttaatctgctgatgacactgcggctgtggagttcccgggcgaaacgctctggaagcggagcgaccaatttcagcctgctgaagcaggcgggcgatgtggaggagaaccctggcccaatggcgacaagactgctgtgctgggcggcgctgtgcctgctgggagcggaactgactgaagcgggggtcgcgcagagccctcgatacaaaatcattgagaagcggcagtctgtggcgttctggtgcaacccaatcagcggacacgcgaccctgtactggtatcagcagatcctgggccagggccctaagctgctgattcagttccagaacaatggcgtggtggacgatagccagctgccaaaagatagattttccgcggagaggctgaagggcgtggactctacactgaaaattcagcctgcgaagctggaggatagcgcggtgtacctgtgcgcgagctccctggacccaggcgataccggagagctgttctttggagagggcagccggctgacagtgctggaggacctgaggaacgtgaccccacctaaagtgagcctgttcgagccatccaaggcggagatcgcgaataagcagaaagcgaccctggtgtgcctggcgaggggcttctttcccgatcacgtggagctgtcctggtgggtgaacggcaaagaggtgcactctggcgtgtgcacagaccctcaggcgtacaaggagagcaattactcctattgtctgtctagcagactgagggtgagcgcgaccttttggcacaacccccggaatcacttccgctgccaggtgcagtttcacggcctgtccgaggaggataaatggcctgagggctctccaaagcccgtgacacagaatatcagcgcggaggcgtggggaagagcggactgtggcattacaagcgcgtcctatcagcagggcgtgctgtccgcgaccatcctgtacgagattctgctgggcaaggcgacactgtatgcggtgctggtgtccaccctggtggtcatggcgatggtgaagaggaaaaactctcgggcgaaacgctctggaagcggagagggcagaggaagtcttctaacatgcggtgacgtggaggagaatcccggccctatggattggacctggattctgtttctggtggccgctgccacaagagtgcacagcaactgggtgaatgtgatcagcgacctgaagaagatcgaggatctgatccagagcatgcacattgatgccaccctgtacacagaatctgatgtgcaccctagctgtaaagtgaccgccatgaagtgttttctgctggagctgcaggtgatttctctggaaagcggagatgcctctatccacgacacagtggagaatctgatcatcctggccaacaatagcctgagcagcaatggcaatgtgacagagtctggctgtaaggagtgtgaggagctggaggagaagaacatcaaggagtttctgcagagctttgtgcacatcgtgcagatgttcatcaatacaagctctggcggaggatctggaggaggcggatctggaggaggaggcagtggaggcggaggatctggcggaggatctctgcagattacatgccctcctccaatgtctgtggagcacgccgatatttgggtgaagtcctacagcctgtacagcagagagagatacatctgcaacagcggctttaagagaaaggccggcacctcttctctgacagagtgcgtgctgaataaggccacaaatgtggcccactggacaacacctagcctgaagtgcattagagatcctgccctggtccaccagaggcctgcccctccatctacagtgacaacagccggagtgacacctcagcctgaatctctgagcccttctggaaaagaacctgccgccagctctcctagctctaataataccgccgccacaacagccgccattgtgcctggatctcagctgatgcctagcaagtctcctagcacaggcacaacagagatcagcagccacgaatcttctcacggaacaccttctcagaccaccgccaagaattgggagctgacagcctctgcctctcaccagcctccaggagtgtatcctcagggccactctgatacaacagtggccatcagcacatctacagtgctgctgtgtggactgtctgccgtgtctctgctggcctgttacctgaagtctagacagacacctcctctggcctctgtggagatggaggccatggaagccctgcctgtgacatggggaacaagcagcagagatgaagacctggagaattgttctcaccacctg

SEQ ID NO: 321 - DNA, 3069 bp, synthetic construct
  source 1..3069: mol_type = other DNA
atggagtcctttctgggcggcgtgctgctgatcctgtggctgcaggtggactgggtgaaatcccagaagatcgagcagaactctgaggcgctgaatattcaggagggcaagaccgcgacactgacctgcaactacacaaattattccccagcgtacctgcagtggtataggcaggacccaggcaggggacccgtgtttctgctgctgattcgggagaatgagaaggagaaaagaaaggagaggctgaaagtgaccttcgataccacactgaagcagtctctgtttcacatcacagcgtctcagccagcggacagcgcgacctacctgtgcgcgctggacatctaccctcacgatatgagattcggcgcgggcacaaggctgaccgtgaaaccaaacatccagaatcccgagcctgcggtgtaccagctgaaggacccccgctctcaggatagcacactgtgcctgttcaccgactttgatagccagatcaacgtgcctaaaacaatggagtccggcaccttcatcaccgacaagtgcgtgctggatatgaaagcgatggactccaagtctaacggcgcgatcgcgtggtccaatcagacatctttcacctgccaggatatcttcaaggagacaaacgcgacctatccttcctctgacgtgccatgtgatgcgacactgaccgagaagagcttcgagacagacatgaacctgaattttcagaatctgctggtcatcgtgctgagaatcctgctgctgaaggtggcgggctttaatctgctgatgacactgcggctgtggagttcccgggcgaaacgctctggaagcggagagggcagaggaagtcttctaacatgcggtgacgtggaggagaatcccggccctatggcgacaagactgctgtgctgggcggcgctgtgcctgctgggagcggaactgactgaagcgggggtcgcgcagagccctcgatacaaaatcattgagaagcggcagtctgtggcgttctggtgcaacccaatcagcggacacgcgaccctgtactggtatcagcagatcctgggccagggccctaagctgctgattcagttccagaacaatggcgtggtggacgatagccagctgccaaaagatagattttccgcggagaggctgaagggcgtggactctacactgaaaattcagcctgcgaagctggaggatagcgcggtgtacctgtgcgcgagctccctggacccaggcgataccggagagctgttctttggagagggcagccggctgacagtgctggaggacctgaggaacgtgaccccacctaaagtgagcctgttcgagccatccaaggcggagatcgcgaataagcagaaagcgaccctggtgtgcctggcgaggggcttctttcccgatcacgtggagctgtcctggtgggtgaacggcaaagaggtgcactctggcgtgtgcacagaccctcaggcgtacaaggagagcaattactcctattgtctgtctagcagactgagggtgagcgcgaccttttggcacaacccccggaatcacttccgctgccaggtgcagtttcacggcctgtccgaggaggataaatggcctgagggctctccaaagcccgtgacacagaatatcagcgcggaggcgtggggaagagcggactgtggcattacaagcgcgtcctatcagcagggcgtgctgtccgcgaccatcctgtacgagattctgctgggcaaggcgacactgtatgcggtgctggtgtccaccctggtggtcatggcgatggtgaagaggaaaaactctcgggcgaaacgctctggaagcggagcgaccaatttcagcctgctgaagcaggcgggcgatgtggaggagaaccctggcccaatggattggacctggattctgtttctggtggccgctgccacaagagtgcacagcaactgggtgaatgtgatcagcgacctgaagaagatcgaggatctgatccagagcatgcacattgatgccaccctgtacacagaatctgatgtgcaccctagctgtaaagtgaccgccatgaagtgttttctgctggagctgcaggtgatttctctggaaagcggagatgcctctatccacgacacagtggagaatctgatcatcctggccaacaatagcctgagcagcaatggcaatgtgacagagtctggctgtaaggagtgtgaggagctggaggagaagaacatcaaggagtttctgcagagctttgtgcacatcgtgcagatgttcatcaatacaagctctggcggaggatctggaggaggcggatctggaggaggaggcagtggaggcggaggatctggcggaggatctctgcagattacatgccctcctccaatgtctgtggagcacgccgatatttgggtgaagtcctacagcctgtacagcagagagagatacatctgcaacagcggctttaagagaaaggccggcacctcttctctgacagagtgcgtgctgaataaggccacaaatgtggcccactggacaacacctagcctgaagtgcattagagatcctgccctggtccaccagaggcctgcccctccatctacagtgacaacagccggagtgacacctcagcctgaatctctgagcccttctggaaaagaacctgccgccagctctcctagctctaataataccgccgccacaacagccgccattgtgcctggatctcagctgatgcctagcaagtctcctagcacaggcacaacagagatcagcagccacgaatcttctcacggaacaccttctcagaccaccgccaagaattgggagctgacagcctctgcctctcaccagcctccaggagtgtatcctcagggccactctgatacaacagtggccatcagcacatctacagtgctgctgtgtggactgtctgccgtgtctctgctggcctgttacctgaagtctagacagacacctcctctggcctctgtggagatggaggccatggaagccctgcctgtgacatggggaacaagcagcagagatgaagacctggagaattgttctcaccacctg

SEQ ID NO: 322 - DNA, 3069 bp, synthetic construct
  source 1..3069: mol_type = other DNA
atggagtcctttctgggcggcgtgctgctgatcctgtggctgcaggtggactgggtgaaatcccagaagatcgagcagaactctgaggcgctgaatattcaggagggcaagaccgcgacactgacctgcaactacacaaattattccccagcgtacctgcagtggtataggcaggacccaggcaggggacccgtgtttctgctgctgattcgggagaatgagaaggagaaaagaaaggagaggctgaaagtgaccttcgataccacactgaagcagtctctgtttcacatcacagcgtctcagccagcggacagcgcgacctacctgtgcgcgctggacatctaccctcacgatatgagattcggcgcgggcacaaggctgaccgtgaaaccaaacatccagaatcccgagcctgcggtgtaccagctgaaggacccccgctctcaggatagcacactgtgcctgttcaccgactttgatagccagatcaacgtgcctaaaacaatggagtccggcaccttcatcaccgacaagtgcgtgctggatatgaaagcgatggactccaagtctaacggcgcgatcgcgtggtccaatcagacatctttcacctgccaggatatcttcaaggagacaaacgcgacctatccttcctctgacgtgccatgtgatgcgacactgaccgagaagagcttcgagacagacatgaacctgaattttcagaatctgctggtcatcgtgctgagaatcctgctgctgaaggtggcgggctttaatctgctgatgacactgcggctgtggagttcccgggcgaaacgctctggaagcggagcgaccaatttcagcctgctgaagcaggcgggcgatgtggaggagaaccctggcccaatggattggacctggattctgtttctggtggccgctgccacaagagtgcacagcaactgggtgaatgtgatcagcgacctgaagaagatcgaggatctgatccagagcatgcacattgatgccaccctgtacacagaatctgatgtgcaccctagctgtaaagtgaccgccatgaagtgttttctgctggagctgcaggtgatttctctggaaagcggagatgcctctatccacgacacagtggagaatctgatcatcctggccaacaatagcctgagcagcaatggcaatgtgacagagtctggctgtaaggagtgtgaggagctggaggagaagaacatcaaggagtttctgcagagctttgtgcacatcgtgcagatgttcatcaatacaagctctggcggaggatctggaggaggcggatctggaggaggaggcagtggaggcggaggatctggcggaggatctctgcagattacatgccctcctccaatgtctgtggagcacgccgatatttgggtgaagtcctacagcctgtacagcagagagagatacatctgcaacagcggctttaagagaaaggccggcacctcttctctgacagagtgcgtgctgaataaggccacaaatgtggcccactggacaacacctagcctgaagtgcattagagatcctgccctggtccaccagaggcctgcccctccatctacagtgacaacagccggagtgacacctcagcctgaatctctgagcccttctggaaaagaacctgccgccagctctcctagctctaataataccgccgccacaacagccgccattgtgcctggatctcagctgatgcctagcaagtctcctagcacaggcacaacagagatcagcagccacgaatcttctcacggaacaccttctcagaccaccgccaagaattgggagctgacagcctctgcctctcaccagcctccaggagtgtatcctcagggccactctgatacaacagtggccatcagcacatctacagtgctgctgtgtggactgtctgccgtgtctctgctggcctgttacctgaagtctagacagacacctcctctggcctctgtggagatggaggccatggaagccctgcctgtgacatggggaacaagcagcagagatgaagacctggagaattgttctcaccacctgcgggcgaaacgctctggaagcggagagggcagaggaagtcttctaacatgcggtgacgtggaggagaatcccggccctatggcgacaagactgctgtgctgggcggcgctgtgcctgctgggagcggaactgactgaagcgggggtcgcgcagagccctcgatacaaaatcattgagaagcggcagtctgtggcgttctggtgcaacccaatcagcggacacgcgaccctgtactggtatcagcagatcctgggccagggccctaagctgctgattcagttccagaacaatggcgtggtggacgatagccagctgccaaaagatagattttccgcggagaggctgaagggcgtggactctacactgaaaattcagcctgcgaagctggaggatagcgcggtgtacctgtgcgcgagctccctggacccaggcgataccggagagctgttctttggagagggcagccggctgacagtgctggaggacctgaggaacgtgaccccacctaaagtgagcctgttcgagccatccaaggcggagatcgcgaataagcagaaagcgaccctggtgtgcctggcgaggggcttctttcccgatcacgtggagctgtcctggtgggtgaacggcaaagaggtgcactctggcgtgtgcacagaccctcaggcgtacaaggagagcaattactcctattgtctgtctagcagactgagggtgagcgcgaccttttggcacaacccccggaatcacttccgctgccaggtgcagtttcacggcctgtccgaggaggataaatggcctgagggctctccaaagcccgtgacacagaatatcagcgcggaggcgtggggaagagcggactgtggcattacaagcgcgtcctatcagcagggcgtgctgtccgcgaccatcctgtacgagattctgctgggcaaggcgacactgtatgcggtgctggtgtccaccctggtggtcatggcgatggtgaagaggaaaaactct

SEQ ID NO: 323 - DNA, 3069 bp, synthetic construct
  source 1..3069: mol_type = other DNA
atggagtcctttctgggcggcgtgctgctgatcctgtggctgcaggtggactgggtgaaatcccagaagatcgagcagaactctgaggcgctgaatattcaggagggcaagaccgcgacactgacctgcaactacacaaattattccccagcgtacctgcagtggtataggcaggacccaggcaggggacccgtgtttctgctgctgattcgggagaatgagaaggagaaaagaaaggagaggctgaaagtgaccttcgataccacactgaagcagtctctgtttcacatcacagcgtctcagccagcggacagcgcgacctacctgtgcgcgctggacatctaccctcacgatatgagattcggcgcgggcacaaggctgaccgtgaaaccaaacatccagaatcccgagcctgcggtgtaccagctgaaggacccccgctctcaggatagcacactgtgcctgttcaccgactttgatagccagatcaacgtgcctaaaacaatggagtccggcaccttcatcaccgacaagtgcgtgctggatatgaaagcgatggactccaagtctaacggcgcgatcgcgtggtccaatcagacatctttcacctgccaggatatcttcaaggagacaaacgcgacctatccttcctctgacgtgccatgtgatgcgacactgaccgagaagagcttcgagacagacatgaacctgaattttcagaatctgctggtcatcgtgctgagaatcctgctgctgaaggtggcgggctttaatctgctgatgacactgcggctgtggagttcccgggcgaaacgctctggaagcggagagggcagaggaagtcttctaacatgcggtgacgtggaggagaatcccggccctatggattggacctggattctgtttctggtggccgctgccacaagagtgcacagcaactgggtgaatgtgatcagcgacctgaagaagatcgaggatctgatccagagcatgcacattgatgccaccctgtacacagaatctgatgtgcaccctagctgtaaagtgaccgccatgaagtgttttctgctggagctgcaggtgatttctctggaaagcggagatgcctctatccacgacacagtggagaatctgatcatcctggccaacaatagcctgagcagcaatggcaatgtgacagagtctggctgtaaggagtgtgaggagctggaggagaagaacatcaaggagtttctgcagagctttgtgcacatcgtgcagatgttcatcaatacaagctctggcggaggatctggaggaggcggatctggaggaggaggcagtggaggcggaggatctggcggaggatctctgcagattacatgccctcctccaatgtctgtggagcacgccgatatttgggtgaagtcctacagcctgtacagcagagagagatacatctgcaacagcggctttaagagaaaggccggcacctcttctctgacagagtgcgtgctgaataaggccacaaatgtggcccactggacaacacctagcctgaagtgcattagagatcctgccctggtccaccagaggcctgcccctccatctacagtgacaacagccggagtgacacctcagcctgaatctctgagcccttctggaaaagaacctgccgccagctctcctagctctaataataccgccgccacaacagccgccattgtgcctggatctcagctgatgcctagcaagtctcctagcacaggcacaacagagatcagcagccacgaatcttctcacggaacaccttctcagaccaccgccaagaattgggagctgacagcctctgcctctcaccagcctccaggagtgtatcctcagggccactctgatacaacagtggccatcagcacatctacagtgctgctgtgtggactgtctgccgtgtctctgctggcctgttacctgaagtctagacagacacctcctctggcctctgtggagatggaggccatggaagccctgcctgtgacatggggaacaagcagcagagatgaagacctggagaattgttctcaccacctgcgggcgaaacgctctggaagcggagcgaccaatttcagcctgctgaagcaggcgggcgatgtggaggagaaccctggcccaatggcgacaagactgctgtgctgggcggcgctgtgcctgctgggagcggaactgactgaagcgggggtcgcgcagagccctcgatacaaaatcattgagaagcggcagtctgtggcgttctggtgcaacccaatcagcggacacgcgaccctgtactggtatcagcagatcctgggccagggccctaagctgctgattcagttccagaacaatggcgtggtggacgatagccagctgccaaaagatagattttccgcggagaggctgaagggcgtggactctacactgaaaattcagcctgcgaagctggaggatagcgcggtgtacctgtgcgcgagctccctggacccaggcgataccggagagctgttctttggagagggcagccggctgacagtgctggaggacctgaggaacgtgaccccacctaaagtgagcctgttcgagccatccaaggcggagatcgcgaataagcagaaagcgaccctggtgtgcctggcgaggggcttctttcccgatcacgtggagctgtcctggtgggtgaacggcaaagaggtgcactctggcgtgtgcacagaccctcaggcgtacaaggagagcaattactcctattgtctgtctagcagactgagggtgagcgcgaccttttggcacaacccccggaatcacttccgctgccaggtgcagtttcacggcctgtccgaggaggataaatggcctgagggctctccaaagcccgtgacacagaatatcagcgcggaggcgtggggaagagcggactgtggcattacaagcgcgtcctatcagcagggcgtgctgtccgcgaccatcctgtacgagattctgctgggcaaggcgacactgtatgcggtgctggtgtccaccctggtggtcatggcgatggtgaagaggaaaaactct

SEQ ID NO: 324 - DNA, 3069 bp, synthetic construct
  source 1..3069: mol_type = other DNA
atggcgacaagactgctgtgctgggcggcgctgtgcctgctgggagcggaactgactgaagcgggggtcgcgcagagccctcgatacaaaatcattgagaagcggcagtctgtggcgttctggtgcaacccaatcagcggacacgcgaccctgtactggtatcagcagatcctgggccagggccctaagctgctgattcagttccagaacaatggcgtggtggacgatagccagctgccaaaagatagattttccgcggagaggctgaagggcgtggactctacactgaaaattcagcctgcgaagctggaggatagcgcggtgtacctgtgcgcgagctccctggacccaggcgataccggagagctgttctttggagagggcagccggctgacagtgctggaggacctgaggaacgtgaccccacctaaagtgagcctgttcgagccatccaaggcggagatcgcgaataagcagaaagcgaccctggtgtgcctggcgaggggcttctttcccgatcacgtggagctgtcctggtgggtgaacggcaaagaggtgcactctggcgtgtgcacagaccctcaggcgtacaaggagagcaattactcctattgtctgtctagcagactgagggtgagcgcgaccttttggcacaacccccggaatcacttccgctgccaggtgcagtttcacggcctgtccgaggaggataaatggcctgagggctctccaaagcccgtgacacagaatatcagcgcggaggcgtggggaagagcggactgtggcattacaagcgcgtcctatcagcagggcgtgctgtccgcgaccatcctgtacgagattctgctgggcaaggcgacactgtatgcggtgctggtgtccaccctggtggtcatggcgatggtgaagaggaaaaactctcgggcgaaacgctctggaagcggagcgaccaatttcagcctgctgaagcaggcgggcgatgtggaggagaaccctggcccaatggagtcctttctgggcggcgtgctgctgatcctgtggctgcaggtggactgggtgaaatcccagaagatcgagcagaactctgaggcgctgaatattcaggagggcaagaccgcgacactgacctgcaactacacaaattattccccagcgtacctgcagtggtataggcaggacccaggcaggggacccgtgtttctgctgctgattcgggagaatgagaaggagaaaagaaaggagaggctgaaagtgaccttcgataccacactgaagcagtctctgtttcacatcacagcgtctcagccagcggacagcgcgacctacctgtgcgcgctggacatctaccctcacgatatgagattcggcgcgggcacaaggctgaccgtgaaaccaaacatccagaatcccgagcctgcggtgtaccagctgaaggacccccgctctcaggatagcacactgtgcctgttcaccgactttgatagccagatcaacgtgcctaaaacaatggagtccggcaccttcatcaccgacaagtgcgtgctggatatgaaagcgatggactccaagtctaacggcgcgatcgcgtggtccaatcagacatctttcacctgccaggatatcttcaaggagacaaacgcgacctatccttcctctgacgtgccatgtgatgcgacactgaccgagaagagcttcgagacagacatgaacctgaattttcagaatctgctggtcatcgtgctgagaatcctgctgctgaaggtggcgggctttaatctgctgatgacactgcggctgtggagttcccgggcgaaacgctctggaagcggagagggcagaggaagtcttctaacatgcggtgacgtggaggagaatcccggccctatggattggacctggattctgtttctggtggccgctgccacaagagtgcacagcaactgggtgaatgtgatcagcgacctgaagaagatcgaggatctgatccagagcatgcacattgatgccaccctgtacacagaatctgatgtgcaccctagctgtaaagtgaccgccatgaagtgttttctgctggagctgcaggtgatttctctggaaagcggagatgcctctatccacgacacagtggagaatctgatcatcctggccaacaatagcctgagcagcaatggcaatgtgacagagtctggctgtaaggagtgtgaggagctggaggagaagaacatcaaggagtttctgcagagctttgtgcacatcgtgcagatgttcatcaatacaagctctggcggaggatctggaggaggcggatctggaggaggaggcagtggaggcggaggatctggcggaggatctctgcagattacatgccctcctccaatgtctgtggagcacgccgatatttgggtgaagtcctacagcctgtacagcagagagagatacatctgcaacagcggctttaagagaaaggccggcacctcttctctgacagagtgcgtgctgaataaggccacaaatgtggcccactggacaacacctagcctgaagtgcattagagatcctgccctggtccaccagaggcctgcccctccatctacagtgacaacagccggagtgacacctcagcctgaatctctgagcccttctggaaaagaacctgccgccagctctcctagctctaataataccgccgccacaacagccgccattgtgcctggatctcagctgatgcctagcaagtctcctagcacaggcacaacagagatcagcagccacgaatcttctcacggaacaccttctcagaccaccgccaagaattgggagctgacagcctctgcctctcaccagcctccaggagtgtatcctcagggccactctgatacaacagtggccatcagcacatctacagtgctgctgtgtggactgtctgccgtgtctctgctggcctgttacctgaagtctagacagacacctcctctggcctctgtggagatggaggccatggaagccctgcctgtgacatggggaacaagcagcagagatgaagacctggagaattgttctcaccacctg

SEQ ID NO: 325 - DNA, 3069 bp, synthetic construct
  source 1..3069: mol_type = other DNA
atggcgacaagactgctgtgctgggcggcgctgtgcctgctgggagcggaactgactgaagcgggggtcgcgcagagccctcgatacaaaatcattgagaagcggcagtctgtggcgttctggtgcaacccaatcagcggacacgcgaccctgtactggtatcagcagatcctgggccagggccctaagctgctgattcagttccagaacaatggcgtggtggacgatagccagctgccaaaagatagattttccgcggagaggctgaagggcgtggactctacactgaaaattcagcctgcgaagctggaggatagcgcggtgtacctgtgcgcgagctccctggacccaggcgataccggagagctgttctttggagagggcagccggctgacagtgctggaggacctgaggaacgtgaccccacctaaagtgagcctgttcgagccatccaaggcggagatcgcgaataagcagaaagcgaccctggtgtgcctggcgaggggcttctttcccgatcacgtggagctgtcctggtgggtgaacggcaaagaggtgcactctggcgtgtgcacagaccctcaggcgtacaaggagagcaattactcctattgtctgtctagcagactgagggtgagcgcgaccttttggcacaacccccggaatcacttccgctgccaggtgcagtttcacggcctgtccgaggaggataaatggcctgagggctctccaaagcccgtgacacagaatatcagcgcggaggcgtggggaagagcggactgtggcattacaagcgcgtcctatcagcagggcgtgctgtccgcgaccatcctgtacgagattctgctgggcaaggcgacactgtatgcggtgctggtgtccaccctggtggtcatggcgatggtgaagaggaaaaactctcgggcgaaacgctctggaagcggagagggcagaggaagtcttctaacatgcggtgacgtggaggagaatcccggccctatggagtcctttctgggcggcgtgctgctgatcctgtggctgcaggtggactgggtgaaatcccagaagatcgagcagaactctgaggcgctgaatattcaggagggcaagaccgcgacactgacctgcaactacacaaattattccccagcgtacctgcagtggtataggcaggacccaggcaggggacccgtgtttctgctgctgattcgggagaatgagaaggagaaaagaaaggagaggctgaaagtgaccttcgataccacactgaagcagtctctgtttcacatcacagcgtctcagccagcggacagcgcgacctacctgtgcgcgctggacatctaccctcacgatatgagattcggcgcgggcacaaggctgaccgtgaaaccaaacatccagaatcccgagcctgcggtgtaccagctgaaggacccccgctctcaggatagcacactgtgcctgttcaccgactttgatagccagatcaacgtgcctaaaacaatggagtccggcaccttcatcaccgacaagtgcgtgctggatatgaaagcgatggactccaagtctaacggcgcgatcgcgtggtccaatcagacatctttcacctgccaggatatcttcaaggagacaaacgcgacctatccttcctctgacgtgccatgtgatgcgacactgaccgagaagagcttcgagacagacatgaacctgaattttcagaatctgctggtcatcgtgctgagaatcctgctgctgaaggtggcgggctttaatctgctgatgacactgcggctgtggagttcccgggcgaaacgctctggaagcggagcgaccaatttcagcctgctgaagcaggcgggcgatgtggaggagaaccctggcccaatggattggacctggattctgtttctggtggccgctgccacaagagtgcacagcaactgggtgaatgtgatcagcgacctgaagaagatcgaggatctgatccagagcatgcacattgatgccaccctgtacacagaatctgatgtgcaccctagctgtaaagtgaccgccatgaagtgttttctgctggagctgcaggtgatttctctggaaagcggagatgcctctatccacgacacagtggagaatctgatcatcctggccaacaatagcctgagcagcaatggcaatgtgacagagtctggctgtaaggagtgtgaggagctggaggagaagaacatcaaggagtttctgcagagctttgtgcacatcgtgcagatgttcatcaatacaagctctggcggaggatctggaggaggcggatctggaggaggaggcagtggaggcggaggatctggcggaggatctctgcagattacatgccctcctccaatgtctgtggagcacgccgatatttgggtgaagtcctacagcctgtacagcagagagagatacatctgcaacagcggctttaagagaaaggccggcacctcttctctgacagagtgcgtgctgaataaggccacaaatgtggcccactggacaacacctagcctgaagtgcattagagatcctgccctggtccaccagaggcctgcccctccatctacagtgacaacagccggagtgacacctcagcctgaatctctgagcccttctggaaaagaacctgccgccagctctcctagctctaataataccgccgccacaacagccgccattgtgcctggatctcagctgatgcctagcaagtctcctagcacaggcacaacagagatcagcagccacgaatcttctcacggaacaccttctcagaccaccgccaagaattgggagctgacagcctctgcctctcaccagcctccaggagtgtatcctcagggccactctgatacaacagtggccatcagcacatctacagtgctgctgtgtggactgtctgccgtgtctctgctggcctgttacctgaagtctagacagacacctcctctggcctctgtggagatggaggccatggaagccctgcctgtgacatggggaacaagcagcagagatgaagacctggagaattgttctcaccacctg

SEQ ID NO: 326 - DNA, 3069 bp, synthetic construct
  source 1..3069: mol_type = other DNA
atggcgacaagactgctgtgctgggcggcgctgtgcctgctgggagcggaactgactgaagcgggggtcgcgcagagccctcgatacaaaatcattgagaagcggcagtctgtggcgttctggtgcaacccaatcagcggacacgcgaccctgtactggtatcagcagatcctgggccagggccctaagctgctgattcagttccagaacaatggcgtggtggacgatagccagctgccaaaagatagattttccgcggagaggctgaagggcgtggactctacactgaaaattcagcctgcgaagctggaggatagcgcggtgtacctgtgcgcgagctccctggacccaggcgataccggagagctgttctttggagagggcagccggctgacagtgctggaggacctgaggaacgtgaccccacctaaagtgagcctgttcgagccatccaaggcggagatcgcgaataagcagaaagcgaccctggtgtgcctggcgaggggcttctttcccgatcacgtggagctgtcctggtgggtgaacggcaaagaggtgcactctggcgtgtgcacagaccctcaggcgtacaaggagagcaattactcctattgtctgtctagcagactgagggtgagcgcgaccttttggcacaacccccggaatcacttccgctgccaggtgcagtttcacggcctgtccgaggaggataaatggcctgagggctctccaaagcccgtgacacagaatatcagcgcggaggcgtggggaagagcggactgtggcattacaagcgcgtcctatcagcagggcgtgctgtccgcgaccatcctgtacgagattctgctgggcaaggcgacactgtatgcggtgctggtgtccaccctggtggtcatggcgatggtgaagaggaaaaactctcgggcgaaacgctctggaagcggagcgaccaatttcagcctgctgaagcaggcgggcgatgtggaggagaaccctggcccaatggattggacctggattctgtttctggtggccgctgccacaagagtgcacagcaactgggtgaatgtgatcagcgacctgaagaagatcgaggatctgatccagagcatgcacattgatgccaccctgtacacagaatctgatgtgcaccctagctgtaaagtgaccgccatgaagtgttttctgctggagctgcaggtgatttctctggaaagcggagatgcctctatccacgacacagtggagaatctgatcatcctggccaacaatagcctgagcagcaatggcaatgtgacagagtctggctgtaaggagtgtgaggagctggaggagaagaacatcaaggagtttctgcagagctttgtgcacatcgtgcagatgttcatcaatacaagctctggcggaggatctggaggaggcggatctggaggaggaggcagtggaggcggaggatctggcggaggatctctgcagattacatgccctcctccaatgtctgtggagcacgccgatatttgggtgaagtcctacagcctgtacagcagagagagatacatctgcaacagcggctttaagagaaaggccggcacctcttctctgacagagtgcgtgctgaataaggccacaaatgtggcccactggacaacacctagcctgaagtgcattagagatcctgccctggtccaccagaggcctgcccctccatctacagtgacaacagccggagtgacacctcagcctgaatctctgagcccttctggaaaagaacctgccgccagctctcctagctctaataataccgccgccacaacagccgccattgtgcctggatctcagctgatgcctagcaagtctcctagcacaggcacaacagagatcagcagccacgaatcttctcacggaacaccttctcagaccaccgccaagaattgggagctgacagcctctgcctctcaccagcctccaggagtgtatcctcagggccactctgatacaacagtggccatcagcacatctacagtgctgctgtgtggactgtctgccgtgtctctgctggcctgttacctgaagtctagacagacacctcctctggcctctgtggagatggaggccatggaagccctgcctgtgacatggggaacaagcagcagagatgaagacctggagaattgttctcaccacctgcgggcgaaacgctctggaagcggagagggcagaggaagtcttctaacatgcggtgacgtggaggagaatcccggccctatggagtcctttctgggcggcgtgctgctgatcctgtggctgcaggtggactgggtgaaatcccagaagatcgagcagaactctgaggcgctgaatattcaggagggcaagaccgcgacactgacctgcaactacacaaattattccccagcgtacctgcagtggtataggcaggacccaggcaggggacccgtgtttctgctgctgattcgggagaatgagaaggagaaaagaaaggagaggctgaaagtgaccttcgataccacactgaagcagtctctgtttcacatcacagcgtctcagccagcggacagcgcgacctacctgtgcgcgctggacatctaccctcacgatatgagattcggcgcgggcacaaggctgaccgtgaaaccaaacatccagaatcccgagcctgcggtgtaccagctgaaggacccccgctctcaggatagcacactgtgcctgttcaccgactttgatagccagatcaacgtgcctaaaacaatggagtccggcaccttcatcaccgacaagtgcgtgctggatatgaaagcgatggactccaagtctaacggcgcgatcgcgtggtccaatcagacatctttcacctgccaggatatcttcaaggagacaaacgcgacctatccttcctctgacgtgccatgtgatgcgacactgaccgagaagagcttcgagacagacatgaacctgaattttcagaatctgctggtcatcgtgctgagaatcctgctgctgaaggtggcgggctttaatctgctgatgacactgcggctgtggagttcc

SEQ ID NO: 327 - DNA, 3069 bp, synthetic construct
  source 1..3069: mol_type = other DNA
atggcgacaagactgctgtgctgggcggcgctgtgcctgctgggagcggaactgactgaagcgggggtcgcgcagagccctcgatacaaaatcattgagaagcggcagtctgtggcgttctggtgcaacccaatcagcggacacgcgaccctgtactggtatcagcagatcctgggccagggccctaagctgctgattcagttccagaacaatggcgtggtggacgatagccagctgccaaaagatagattttccgcggagaggctgaagggcgtggactctacactgaaaattcagcctgcgaagctggaggatagcgcggtgtacctgtgcgcgagctccctggacccaggcgataccggagagctgttctttggagagggcagccggctgacagtgctggaggacctgaggaacgtgaccccacctaaagtgagcctgttcgagccatccaaggcggagatcgcgaataagcagaaagcgaccctggtgtgcctggcgaggggcttctttcccgatcacgtggagctgtcctggtgggtgaacggcaaagaggtgcactctggcgtgtgcacagaccctcaggcgtacaaggagagcaattactcctattgtctgtctagcagactgagggtgagcgcgaccttttggcacaacccccggaatcacttccgctgccaggtgcagtttcacggcctgtccgaggaggataaatggcctgagggctctccaaagcccgtgacacagaatatcagcgcggaggcgtggggaagagcggactgtggcattacaagcgcgtcctatcagcagggcgtgctgtccgcgaccatcctgtacgagattctgctgggcaaggcgacactgtatgcggtgctggtgtccaccctggtggtcatggcgatggtgaagaggaaaaactctcgggcgaaacgctctggaagcggagagggcagaggaagtcttctaacatgcggtgacgtggaggagaatcccggccctatggattggacctggattctgtttctggtggccgctgccacaagagtgcacagcaactgggtgaatgtgatcagcgacctgaagaagatcgaggatctgatccagagcatgcacattgatgccaccctgtacacagaatctgatgtgcaccctagctgtaaagtgaccgccatgaagtgttttctgctggagctgcaggtgatttctctggaaagcggagatgcctctatccacgacacagtggagaatctgatcatcctggccaacaatagcctgagcagcaatggcaatgtgacagagtctggctgtaaggagtgtgaggagctggaggagaagaacatcaaggagtttctgcagagctttgtgcacatcgtgcagatgttcatcaatacaagctctggcggaggatctggaggaggcggatctggaggaggaggcagtggaggcggaggatctggcggaggatctctgcagattacatgccctcctccaatgtctgtggagcacgccgatatttgggtgaagtcctacagcctgtacagcagagagagatacatctgcaacagcggctttaagagaaaggccggcacctcttctctgacagagtgcgtgctgaataaggccacaaatgtggcccactggacaacacctagcctgaagtgcattagagatcctgccctggtccaccagaggcctgcccctccatctacagtgacaacagccggagtgacacctcagcctgaatctctgagcccttctggaaaagaacctgccgccagctctcctagctctaataataccgccgccacaacagccgccattgtgcctggatctcagctgatgcctagcaagtctcctagcacaggcacaacagagatcagcagccacgaatcttctcacggaacaccttctcagaccaccgccaagaattgggagctgacagcctctgcctctcaccagcctccaggagtgtatcctcagggccactctgatacaacagtggccatcagcacatctacagtgctgctgtgtggactgtctgccgtgtctctgctggcctgttacctgaagtctagacagacacctcctctggcctctgtggagatggaggccatggaagccctgcctgtgacatggggaacaagcagcagagatgaagacctggagaattgttctcaccacctgcgggcgaaacgctctggaagcggagcgaccaatttcagcctgctgaagcaggcgggcgatgtggaggagaaccctggcccaatggagtcctttctgggcggcgtgctgctgatcctgtggctgcaggtggactgggtgaaatcccagaagatcgagcagaactctgaggcgctgaatattcaggagggcaagaccgcgacactgacctgcaactacacaaattattccccagcgtacctgcagtggtataggcaggacccaggcaggggacccgtgtttctgctgctgattcgggagaatgagaaggagaaaagaaaggagaggctgaaagtgaccttcgataccacactgaagcagtctctgtttcacatcacagcgtctcagccagcggacagcgcgacctacctgtgcgcgctggacatctaccctcacgatatgagattcggcgcgggcacaaggctgaccgtgaaaccaaacatccagaatcccgagcctgcggtgtaccagctgaaggacccccgctctcaggatagcacactgtgcctgttcaccgactttgatagccagatcaacgtgcctaaaacaatggagtccggcaccttcatcaccgacaagtgcgtgctggatatgaaagcgatggactccaagtctaacggcgcgatcgcgtggtccaatcagacatctttcacctgccaggatatcttcaaggagacaaacgcgacctatccttcctctgacgtgccatgtgatgcgacactgaccgagaagagcttcgagacagacatgaacctgaattttcagaatctgctggtcatcgtgctgagaatcctgctgctgaaggtggcgggctttaatctgctgatgacactgcggctgtggagttcc

SEQ ID NO: 328-329 - skipped (2 entries)

SEQ ID NO: 330 - protein, 1023 aa, synthetic construct
MESFLGGVLLILWLQVDWVKSQKIEQNSEALNIQEGKTATLTCNYTNYSPAYLQWYRQDPGRGPVFLLLIRENEKEKRKERLKVTFDTTLKQSLFHITASQPADSATYLCALDIYPHDMRFGAGTRLTVKPNIQNPEPAVYQLKDPRSQDSTLCLFTDFDSQINVPKTMESGTFITDKCVLDMKAMDSKSNGAIAWSNQTSFTCQDIFKETNATYPSSDVPCDATLTEKSFETDMNLNFQNLLVIVLRILLLKVAGFNLLMTLRLWSSRAKRSGSGATNFSLLKQAGDVEENPGPMATRLLCWAALCLLGAELTEAGVAQSPRYKIIEKRQSVAFWCNPISGHATLYWYQQILGQGPKLLIQFQNNGVVDDSQLPKDRFSAERLKGVDSTLKIQPAKLEDSAVYLCASSLDPGDTGELFFGEGSRLTVLEDLRNVTPPKVSLFEPSKAEIANKQKATLVCLARGFFPDHVELSWWVNGKEVHSGVCTDPQAYKESNYSYCLSSRLRVSATFWHNPRNHFRCQVQFHGLSEEDKWPEGSPKPVTQNISAEAWGRADCGITSASYQQGVLSATILYEILLGKATLYAVLVSTLVVMAMVKRKNSRAKRSGSGEGRGSLLTCGDVEENPGPMDWTWILFLVAAATRVHSNWVNVISDLKKIEDLIQSMHIDATLYTESDVHPSCKVTAMKCFLLELQVISLESGDASIHDTVENLIILANNSLSSNGNVTESGCKECEELEEKNIKEFLQSFVHIVQMFINTSSGGGSGGGGSGGGGSGGGGSGGGSLQITCPPPMSVEHADIWVKSYSLYSRERYICNSGFKRKAGTSSLTECVLNKATNVAHWTTPSLKCIRDPALVHQRPAPPSTVTTAGVTPQPESLSPSGKEPAASSPSSNNTAATTAAIVPGSQLMPSKSPSTGTTEISSHESSHGTPSQTTAKNWELTASASHQPPGVYPQGHSDTTVAISTSTVLLCGLSAVSLLACYLKSRQTPPLASVEMEAMEALPVTWGTSSRDEDLENCSHHL

SEQ ID NO: 331 - protein, 1023 aa, synthetic construct
MESFLGGVLLILWLQVDWVKSQKIEQNSEALNIQEGKTATLTCNYTNYSPAYLQWYRQDPGRGPVFLLLIRENEKEKRKERLKVTFDTTLKQSLFHITASQPADSATYLCALDIYPHDMRFGAGTRLTVKPNIQNPEPAVYQLKDPRSQDSTLCLFTDFDSQINVPKTMESGTFITDKCVLDMKAMDSKSNGAIAWSNQTSFTCQDIFKETNATYPSSDVPCDATLTEKSFETDMNLNFQNLLVIVLRILLLKVAGFNLLMTLRLWSSRAKRSGSGEGRGSLLTCGDVEENPGPMATRLLCWAALCLLGAELTEAGVAQSPRYKIIEKRQSVAFWCNPISGHATLYWYQQILGQGPKLLIQFQNNGVVDDSQLPKDRFSAERLKGVDSTLKIQPAKLEDSAVYLCASSLDPGDTGELFFGEGSRLTVLEDLRNVTPPKVSLFEPSKAEIANKQKATLVCLARGFFPDHVELSWWVNGKEVHSGVCTDPQAYKESNYSYCLSSRLRVSATFWHNPRNHFRCQVQFHGLSEEDKWPEGSPKPVTQNISAEAWGRADCGITSASYQQGVLSATILYEILLGKATLYAVLVSTLVVMAMVKRKNSRAKRSGSGATNFSLLKQAGDVEENPGPMDWTWILFLVAAATRVHSNWVNVISDLKKIEDLIQSMHIDATLYTESDVHPSCKVTAMKCFLLELQVISLESGDASIHDTVENLIILANNSLSSNGNVTESGCKECEELEEKNIKEFLQSFVHIVQMFINTSSGGGSGGGGSGGGGSGGGGSGGGSLQITCPPPMSVEHADIWVKSYSLYSRERYICNSGFKRKAGTSSLTECVLNKATNVAHWTTPSLKCIRDPALVHQRPAPPSTVTTAGVTPQPESLSPSGKEPAASSPSSNNTAATTAAIVPGSQLMPSKSPSTGTTEISSHESSHGTPSQTTAKNWELTASASHQPPGVYPQGHSDTTVAISTSTVLLCGLSAVSLLACYLKSRQTPPLASVEMEAMEALPVTWGTSSRDEDLENCSHHL

SEQ ID NO: 332 - protein, 1023 aa, synthetic construct
MESFLGGVLLILWLQVDWVKSQKIEQNSEALNIQEGKTATLTCNYTNYSPAYLQWYRQDPGRGPVFLLLIRENEKEKRKERLKVTFDTTLKQSLFHITASQPADSATYLCALDIYPHDMRFGAGTRLTVKPNIQNPEPAVYQLKDPRSQDSTLCLFTDFDSQINVPKTMESGTFITDKCVLDMKAMDSKSNGAIAWSNQTSFTCQDIFKETNATYPSSDVPCDATLTEKSFETDMNLNFQNLLVIVLRILLLKVAGFNLLMTLRLWSSRAKRSGSGATNFSLLKQAGDVEENPGPMDWTWILFLVAAATRVHSNWVNVISDLKKIEDLIQSMHIDATLYTESDVHPSCKVTAMKCFLLELQVISLESGDASIHDTVENLIILANNSLSSNGNVTESGCKECEELEEKNIKEFLQSFVHIVQMFINTSSGGGSGGGGSGGGGSGGGGSGGGSLQITCPPPMSVEHADIWVKSYSLYSRERYICNSGFKRKAGTSSLTECVLNKATNVAHWTTPSLKCIRDPALVHQRPAPPSTVTTAGVTPQPESLSPSGKEPAASSPSSNNTAATTAAIVPGSQLMPSKSPSTGTTEISSHESSHGTPSQTTAKNWELTASASHQPPGVYPQGHSDTTVAISTSTVLLCGLSAVSLLACYLKSRQTPPLASVEMEAMEALPVTWGTSSRDEDLENCSHHLRAKRSGSGEGRGSLLTCGDVEENPGPMATRLLCWAALCLLGAELTEAGVAQSPRYKIIEKRQSVAFWCNPISGHATLYWYQQILGQGPKLLIQFQNNGVVDDSQLPKDRFSAERLKGVDSTLKIQPAKLEDSAVYLCASSLDPGDTGELFFGEGSRLTVLEDLRNVTPPKVSLFEPSKAEIANKQKATLVCLARGFFPDHVELSWWVNGKEVHSGVCTDPQAYKESNYSYCLSSRLRVSATFWHNPRNHFRCQVQFHGLSEEDKWPEGSPKPVTQNISAEAWGRADCGITSASYQQGVLSATILYEILLGKATLYAVLVSTLVVMAMVKRKNS

SEQ ID NO: 333 - protein, 1023 aa, synthetic construct
MESFLGGVLLILWLQVDWVKSQKIEQNSEALNIQEGKTATLTCNYTNYSPAYLQWYRQDPGRGPVFLLLIRENEKEKRKERLKVTFDTTLKQSLFHITASQPADSATYLCALDIYPHDMRFGAGTRLTVKPNIQNPEPAVYQLKDPRSQDSTLCLFTDFDSQINVPKTMESGTFITDKCVLDMKAMDSKSNGAIAWSNQTSFTCQDIFKETNATYPSSDVPCDATLTEKSFETDMNLNFQNLLVIVLRILLLKVAGFNLLMTLRLWSSRAKRSGSGEGRGSLLTCGDVEENPGPMDWTWILFLVAAATRVHSNWVNVISDLKKIEDLIQSMHIDATLYTESDVHPSCKVTAMKCFLLELQVISLESGDASIHDTVENLIILANNSLSSNGNVTESGCKECEELEEKNIKEFLQSFVHIVQMFINTSSGGGSGGGGSGGGGSGGGGSGGGSLQITCPPPMSVEHADIWVKSYSLYSRERYICNSGFKRKAGTSSLTECVLNKATNVAHWTTPSLKCIRDPALVHQRPAPPSTVTTAGVTPQPESLSPSGKEPAASSPSSNNTAATTAAIVPGSQLMPSKSPSTGTTEISSHESSHGTPSQTTAKNWELTASASHQPPGVYPQGHSDTTVAISTSTVLLCGLSAVSLLACYLKSRQTPPLASVEMEAMEALPVTWGTSSRDEDLENCSHHLRAKRSGSGATNFSLLKQAGDVEENPGPMATRLLCWAALCLLGAELTEAGVAQSPRYKIIEKRQSVAFWCNPISGHATLYWYQQILGQGPKLLIQFQNNGVVDDSQLPKDRFSAERLKGVDSTLKIQPAKLEDSAVYLCASSLDPGDTGELFFGEGSRLTVLEDLRNVTPPKVSLFEPSKAEIANKQKATLVCLARGFFPDHVELSWWVNGKEVHSGVCTDPQAYKESNYSYCLSSRLRVSATFWHNPRNHFRCQVQFHGLSEEDKWPEGSPKPVTQNISAEAWGRADCGITSASYQQGVLSATILYEILLGKATLYAVLVSTLVVMAMVKRKNS

SEQ ID NO: 334 - protein, 1023 aa, synthetic construct
MATRLLCWAALCLLGAELTEAGVAQSPRYKIIEKRQSVAFWCNPISGHATLYWYQQILGQGPKLLIQFQNNGVVDDSQLPKDRFSAERLKGVDSTLKIQPAKLEDSAVYLCASSLDPGDTGELFFGEGSRLTVLEDLRNVTPPKVSLFEPSKAEIANKQKATLVCLARGFFPDHVELSWWVNGKEVHSGVCTDPQAYKESNYSYCLSSRLRVSATFWHNPRNHFRCQVQFHGLSEEDKWPEGSPKPVTQNISAEAWGRADCGITSASYQQGVLSATILYEILLGKATLYAVLVSTLVVMAMVKRKNSRAKRSGSGATNFSLLKQAGDVEENPGPMESFLGGVLLILWLQVDWVKSQKIEQNSEALNIQEGKTATLTCNYTNYSPAYLQWYRQDPGRGPVFLLLIRENEKEKRKERLKVTFDTTLKQSLFHITASQPADSATYLCALDIYPHDMRFGAGTRLTVKPNIQNPEPAVYQLKDPRSQDSTLCLFTDFDSQINVPKTMESGTFITDKCVLDMKAMDSKSNGAIAWSNQTSFTCQDIFKETNATYPSSDVPCDATLTEKSFETDMNLNFQNLLVIVLRILLLKVAGFNLLMTLRLWSSRAKRSGSGEGRGSLLTCGDVEENPGPMDWTWILFLVAAATRVHSNWVNVISDLKKIEDLIQSMHIDATLYTESDVHPSCKVTAMKCFLLELQVISLESGDASIHDTVENLIILANNSLSSNGNVTESGCKECEELEEKNIKEFLQSFVHIVQMFINTSSGGGSGGGGSGGGGSGGGGSGGGSLQITCPPPMSVEHADIWVKSYSLYSRERYICNSGFKRKAGTSSLTECVLNKATNVAHWTTPSLKCIRDPALVHQRPAPPSTVTTAGVTPQPESLSPSGKEPAASSPSSNNTAATTAAIVPGSQLMPSKSPSTGTTEISSHESSHGTPSQTTAKNWELTASASHQPPGVYPQGHSDTTVAISTSTVLLCGLSAVSLLACYLKSRQTPPLASVEMEAMEALPVTWGTSSRDEDLENCSHHL

SEQ ID NO: 335 - protein, 1023 aa, synthetic construct
MATRLLCWAALCLLGAELTEAGVAQSPRYKIIEKRQSVAFWCNPISGHATLYWYQQILGQGPKLLIQFQNNGVVDDSQLPKDRFSAERLKGVDSTLKIQPAKLEDSAVYLCASSLDPGDTGELFFGEGSRLTVLEDLRNVTPPKVSLFEPSKAEIANKQKATLVCLARGFFPDHVELSWWVNGKEVHSGVCTDPQAYKESNYSYCLSSRLRVSATFWHNPRNHFRCQVQFHGLSEEDKWPEGSPKPVTQNISAEAWGRADCGITSASYQQGVLSATILYEILLGKATLYAVLVSTLVVMAMVKRKNSRAKRSGSGEGRGSLLTCGDVEENPGPMESFLGGVLLILWLQVDWVKSQKIEQNSEALNIQEGKTATLTCNYTNYSPAYLQWYRQDPGRGPVFLLLIRENEKEKRKERLKVTFDTTLKQSLFHITASQPADSATYLCALDIYPHDMRFGAGTRLTVKPNIQNPEPAVYQLKDPRSQDSTLCLFTDFDSQINVPKTMESGTFITDKCVLDMKAMDSKSNGAIAWSNQTSFTCQDIFKETNATYPSSDVPCDATLTEKSFETDMNLNFQNLLVIVLRILLLKVAGFNLLMTLRLWSSRAKRSGSGATNFSLLKQAGDVEENPGPMDWTWILFLVAAATRVHSNWVNVISDLKKIEDLIQSMHIDATLYTESDVHPSCKVTAMKCFLLELQVISLESGDASIHDTVENLIILANNSLSSNGNVTESGCKECEELEEKNIKEFLQSFVHIVQMFINTSSGGGSGGGGSGGGGSGGGGSGGGSLQITCPPPMSVEHADIWVKSYSLYSRERYICNSGFKRKAGTSSLTECVLNKATNVAHWTTPSLKCIRDPALVHQRPAPPSTVTTAGVTPQPESLSPSGKEPAASSPSSNNTAATTAAIVPGSQLMPSKSPSTGTTEISSHESSHGTPSQTTAKNWELTASASHQPPGVYPQGHSDTTVAISTSTVLLCGLSAVSLLACYLKSRQTPPLASVEMEAMEALPVTWGTSSRDEDLENCSHHL

SEQ ID NO: 336 - protein, 1023 aa, synthetic construct
MATRLLCWAALCLLGAELTEAGVAQSPRYKIIEKRQSVAFWCNPISGHATLYWYQQILGQGPKLLIQFQNNGVVDDSQLPKDRFSAERLKGVDSTLKIQPAKLEDSAVYLCASSLDPGDTGELFFGEGSRLTVLEDLRNVTPPKVSLFEPSKAEIANKQKATLVCLARGFFPDHVELSWWVNGKEVHSGVCTDPQAYKESNYSYCLSSRLRVSATFWHNPRNHFRCQVQFHGLSEEDKWPEGSPKPVTQNISAEAWGRADCGITSASYQQGVLSATILYEILLGKATLYAVLVSTLVVMAMVKRKNSRAKRSGSGATNFSLLKQAGDVEENPGPMDWTWILFLVAAATRVHSNWVNVISDLKKIEDLIQSMHIDATLYTESDVHPSCKVTAMKCFLLELQVISLESGDASIHDTVENLIILANNSLSSNGNVTESGCKECEELEEKNIKEFLQSFVHIVQMFINTSSGGGSGGGGSGGGGSGGGGSGGGSLQITCPPPMSVEHADIWVKSYSLYSRERYICNSGFKRKAGTSSLTECVLNKATNVAHWTTPSLKCIRDPALVHQRPAPPSTVTTAGVTPQPESLSPSGKEPAASSPSSNNTAATTAAIVPGSQLMPSKSPSTGTTEISSHESSHGTPSQTTAKNWELTASASHQPPGVYPQGHSDTTVAISTSTVLLCGLSAVSLLACYLKSRQTPPLASVEMEAMEALPVTWGTSSRDEDLENCSHHLRAKRSGSGEGRGSLLTCGDVEENPGPMESFLGGVLLILWLQVDWVKSQKIEQNSEALNIQEGKTATLTCNYTNYSPAYLQWYRQDPGRGPVFLLLIRENEKEKRKERLKVTFDTTLKQSLFHITASQPADSATYLCALDIYPHDMRFGAGTRLTVKPNIQNPEPAVYQLKDPRSQDSTLCLFTDFDSQINVPKTMESGTFITDKCVLDMKAMDSKSNGAIAWSNQTSFTCQDIFKETNATYPSSDVPCDATLTEKSFETDMNLNFQNLLVIVLRILLLKVAGFNLLMTLRLWSS

SEQ ID NO: 337 - protein, 1023 aa, synthetic construct
MATRLLCWAALCLLGAELTEAGVAQSPRYKIIEKRQSVAFWCNPISGHATLYWYQQILGQGPKLLIQFQNNGVVDDSQLPKDRFSAERLKGVDSTLKIQPAKLEDSAVYLCASSLDPGDTGELFFGEGSRLTVLEDLRNVTPPKVSLFEPSKAEIANKQKATLVCLARGFFPDHVELSWWVNGKEVHSGVCTDPQAYKESNYSYCLSSRLRVSATFWHNPRNHFRCQVQFHGLSEEDKWPEGSPKPVTQNISAEAWGRADCGITSASYQQGVLSATILYEILLGKATLYAVLVSTLVVMAMVKRKNSRAKRSGSGEGRGSLLTCGDVEENPGPMDWTWILFLVAAATRVHSNWVNVISDLKKIEDLIQSMHIDATLYTESDVHPSCKVTAMKCFLLELQVISLESGDASIHDTVENLIILANNSLSSNGNVTESGCKECEELEEKNIKEFLQSFVHIVQMFINTSSGGGSGGGGSGGGGSGGGGSGGGSLQITCPPPMSVEHADIWVKSYSLYSRERYICNSGFKRKAGTSSLTECVLNKATNVAHWTTPSLKCIRDPALVHQRPAPPSTVTTAGVTPQPESLSPSGKEPAASSPSSNNTAATTAAIVPGSQLMPSKSPSTGTTEISSHESSHGTPSQTTAKNWELTASASHQPPGVYPQGHSDTTVAISTSTVLLCGLSAVSLLACYLKSRQTPPLASVEMEAMEALPVTWGTSSRDEDLENCSHHLRAKRSGSGATNFSLLKQAGDVEENPGPMESFLGGVLLILWLQVDWVKSQKIEQNSEALNIQEGKTATLTCNYTNYSPAYLQWYRQDPGRGPVFLLLIRENEKEKRKERLKVTFDTTLKQSLFHITASQPADSATYLCALDIYPHDMRFGAGTRLTVKPNIQNPEPAVYQLKDPRSQDSTLCLFTDFDSQINVPKTMESGTFITDKCVLDMKAMDSKSNGAIAWSNQTSFTCQDIFKETNATYPSSDVPCDATLTEKSFETDMNLNFQNLLVIVLRILLLKVAGFNLLMTLRLWSS

SEQ ID NO: 338-339 - skipped (2 entries)

SEQ ID NO: 340 - protein, 393 aa, synthetic construct [sequence omitted]

SEQ ID NO: 341 - protein, 189 aa, synthetic construct [sequence omitted]

SEQ ID NO: 342 - protein, 188 aa, synthetic construct [sequence omitted]

SEQ ID NO: 343 - protein, 1210 aa, synthetic construct [sequence omitted]

SEQ ID NO: 344-1000 - skipped (657 entries)

SEQ ID NO: 1001 - protein, 6 aa, synthetic construct
NYSPAY

SEQ ID NO: 1002 - protein, 7 aa, synthetic construct
IRENEKE

SEQ ID NO: 1003 - protein, 10 aa, synthetic construct
ALDIYPHDMR

SEQ ID NO: 1004 - protein, 110 aa, synthetic construct
QKIEQNSEALNIQEGKTATLTCNYTNYSPAYLQWYRQDPGRGPVFLLLIRENEKEKRKERLKVTFDTTLKQSLFHITASQPADSATYLCALDIYPHDMRFGAGTRLTVKP

SEQ ID NO: 1005 - protein, 111 aa, synthetic construct
SQKIEQNSEALNIQEGKTATLTCNYTNYSPAYLQWYRQDPGRGPVFLLLIRENEKEKRKERLKVTFDTTLKQSLFHITASQPADSATYLCALDIYPHDMRFGAGTRLTVKP

SEQ ID NO: 1006 - protein, 131 aa, synthetic construct
  VARIANT 2: note = X can be any Amino Acid
MXSFLGGVLLILWLQVDWVKSQKIEQNSEALNIQEGKTATLTCNYTNYSPAYLQWYRQDPGRGPVFLLLIRENEKEKRKERLKVTFDTTLKQSLFHITASQPADSATYLCALDIYPHDMRFGAGTRLTVKP

SEQ ID NO: 1007 - protein, 131 aa, synthetic construct; identical to SEQ ID NO: 1006
  VARIANT 2: note = X can be any Amino Acid

SEQ ID NO: 1008 - protein, 268 aa, synthetic construct
MESFLGGVLLILWLQVDWVKSQKIEQNSEALNIQEGKTATLTCNYTNYSPAYLQWYRQDPGRGPVFLLLIRENEKEKRKERLKVTFDTTLKQSLFHITASQPADSATYLCALDIYPHDMRFGAGTRLTVKPNIQNPEPAVYQLKDPRSQDSTLCLFTDFDSQINVPKTMESGTFITDKCVLDMKAMDSKSNGAIAWSNQTSFTCQDIFKETNATYPSSDVPCDATLTEKSFETDMNLNFQNLLVIVLRILLLKVAGFNLLMTLRLWSS

SEQ ID NO: 1009 - protein, 268 aa, synthetic construct
MASFLGGVLLILWLQVDWVKSQKIEQNSEALNIQEGKTATLTCNYTNYSPAYLQWYRQDPGRGPVFLLLIRENEKEKRKERLKVTFDTTLKQSLFHITASQPADSATYLCALDIYPHDMRFGAGTRLTVKPNIQNPEPAVYQLKDPRSQDSTLCLFTDFDSQINVPKTMESGTFITDKCVLDMKAMDSKSNGAIAWSNQTSFTCQDIFKETNATYPSSDVPCDATLTEKSFETDMNLNFQNLLVIVLRILLLKVAGFNLLMTLRLWSS

SEQ ID NO: 1010 - protein, 268 aa, synthetic construct
MHSFLGGVLLILWLQVDWVKSQKIEQNSEALNIQEGKTATLTCNYTNYSPAYLQWYRQDPGRGPVFLLLIRENEKEKRKERLKVTFDTTLKQSLFHITASQPADSATYLCALDIYPHDMRFGAGTRLTVKPNIQNPEPAVYQLKDPRSQDSTLCLFTDFDSQINVPKTMESGTFITDKCVLDMKAMDSKSNGAIAWSNQTSFTCQDIFKETNATYPSSDVPCDATLTEKSFETDMNLNFQNLLVIVLRILLLKVAGFNLLMTLRLWSS

SEQ ID NO: 1011 - protein, 6 aa, synthetic construct
DSASNY

SEQ ID NO: 1012 - protein, 7 aa, synthetic construct
IRSNVGE

SEQ ID NO: 1013 - protein, 17 aa, synthetic construct
AASKSAIMVVLQTSSSL

SEQ ID NO: 1014 - protein, 117 aa, synthetic construct
ENVEQHPSTLSVQEGDSAVIKCTYSDSASNYFPWYKQELGKGPQLIIDIRSNVGEKKDQRIAVTLNKTAKHFSLHITETQPEDSAVYFCAASKSAIMVVLQTSSSLELALCLLSSQV

SEQ ID NO: 1015 - protein, 118 aa, synthetic construct
GENVEQHPSTLSVQEGDSAVIKCTYSDSASNYFPWYKQELGKGPQLIIDIRSNVGEKKDQRIAVTLNKTAKHFSLHITETQPEDSAVYFCAASKSAIMVVLQTSSSLELALCLLSSQV

SEQ ID NO: 1016 - protein, 137 aa, synthetic construct
  VARIANT 2: note = X can be any Amino Acid
MXSIRAVFIFLWLQLDLVNGENVEQHPSTLSVQEGDSAVIKCTYSDSASNYFPWYKQELGKGPQLIIDIRSNVGEKKDQRIAVTLNKTAKHFSLHITETQPEDSAVYFCAASKSAIMVVLQTSSSLELALCLLSSQV

SEQ ID NO: 1017 - protein, 137 aa, synthetic construct; identical to SEQ ID NO: 1016
  VARIANT 2: note = X can be any Amino Acid

SEQ ID NO: 1018 - protein, 274 aa, synthetic construct
MTSIRAVFIFLWLQLDLVNGENVEQHPSTLSVQEGDSAVIKCTYSDSASNYFPWYKQELGKGPQLIIDIRSNVGEKKDQRIAVTLNKTAKHFSLHITETQPEDSAVYFCAASKSAIMVVLQTSSSLELALCLLSSQVNIQNPEPAVYQLKDPRSQDSTLCLFTDFDSQINVPKTMESGTFITDKCVLDMKAMDSKSNGAIAWSNQTSFTCQDIFKETNATYPSSDVPCDATLTEKSFETDMNLNFQNLLVIVLRILLLKVAGFNLLMTLRLWSS

SEQ ID NO: 1019 - protein, 274 aa, synthetic construct
MASIRAVFIFLWLQLDLVNGENVEQHPSTLSVQEGDSAVIKCTYSDSASNYFPWYKQELGKGPQLIIDIRSNVGEKKDQRIAVTLNKTAKHFSLHITETQPEDSAVYFCAASKSAIMVVLQTSSSLELALCLLSSQVNIQNPEPAVYQLKDPRSQDSTLCLFTDFDSQINVPKTMESGTFITDKCVLDMKAMDSKSNGAIAWSNQTSFTCQDIFKETNATYPSSDVPCDATLTEKSFETDMNLNFQNLLVIVLRILLLKVAGFNLLMTLRLWSS

SEQ ID NO: 1020 - protein, 274 aa, synthetic construct
MHSIRAVFIFLWLQLDLVNGENVEQHPSTLSVQEGDSAVIKCTYSDSASNYFPWYKQELGKGPQLIIDIRSNVGEKKDQRIAVTLNKTAKHFSLHITETQPEDSAVYFCAASKSAIMVVLQTSSSLELALCLLSSQVNIQNPEPAVYQLKDPRSQDSTLCLFTDFDSQINVPKTMESGTFITDKCVLDMKAMDSKSNGAIAWSNQTSFTCQDIFKETNATYPSSDVPCDATLTEKSFETDMNLNFQNLLVIVLRILLLKVAGFNLLMTLRLWSS

SEQ ID NO: 1021 - protein, 6 aa, synthetic construct
NSAFQY

SEQ ID NO: 1022 - protein, 6 aa, synthetic construct
TYSSGN

SEQ ID NO: 1023 - protein, 14 aa, synthetic construct
AMSGLKEDSSYKLI

SEQ ID NO: 1024 - protein, 115 aa, synthetic construct
QQKEVEQDPGPLSVPEGAIVSLNCTYSNSAFQYFMWYRQYSRKGPELLMYTYSSGNKEDGRFTAQVDKSSKYISLFIRDSQPSDSATYLCAMSGLKEDSSYKLIFGSGTRLLVRP

SEQ ID NO: 1025 - protein, 114 aa, synthetic construct
QKEVEQDPGPLSVPEGAIVSLNCTYSNSAFQYFMWYRQYSRKGPELLMYTYSSGNKEDGRFTAQVDKSSKYISLFIRDSQPSDSATYLCAMSGLKEDSSYKLIFGSGTRLLVRP

SEQ ID NO: 1026 - protein, 136 aa, synthetic construct
  VARIANT 2: note = X can be any Amino Acid
MXKSLRVLLVILWLQLSWVWSQQKEVEQDPGPLSVPEGAIVSLNCTYSNSAFQYFMWYRQYSRKGPELLMYTYSSGNKEDGRFTAQVDKSSKYISLFIRDSQPSDSATYLCAMSGLKEDSSYKLIFGSGTRLLVRP

SEQ ID NO: 1027 - protein, 136 aa, synthetic construct; identical to SEQ ID NO: 1026
  VARIANT 2: note = X can be any Amino Acid

SEQ ID NO: 1028 - protein, 273 aa, synthetic construct
MMKSLRVLLVILWLQLSWVWSQQKEVEQDPGPLSVPEGAIVSLNCTYSNSAFQYFMWYRQYSRKGPELLMYTYSSGNKEDGRFTAQVDKSSKYISLFIRDSQPSDSATYLCAMSGLKEDSSYKLIFGSGTRLLVRPNIQNPEPAVYQLKDPRSQDSTLCLFTDFDSQINVPKTMESGTFITDKCVLDMKAMDSKSNGAIAWSNQTSFTCQDIFKETNATYPSSDVPCDATLTEKSFETDMNLNFQNLLVIVLRILLLKVAGFNLLMTLRLWSS

SEQ ID NO: 1029 - protein, 273 aa, synthetic construct
MAKSLRVLLVILWLQLSWVWSQQKEVEQDPGPLSVPEGAIVSLNCTYSNSAFQYFMWYRQYSRKGPELLMYTYSSGNKEDGRFTAQVDKSSKYISLFIRDSQPSDSATYLCAMSGLKEDSSYKLIFGSGTRLLVRPNIQNPEPAVYQLKDPRSQDSTLCLFTDFDSQINVPKTMESGTFITDKCVLDMKAMDSKSNGAIAWSNQTSFTCQDIFKETNATYPSSDVPCDATLTEKSFETDMNLNFQNLLVIVLRILLLKVAGFNLLMTLRLWSS

SEQ ID NO: 1030 - protein, 273 aa, synthetic construct
MHKSLRVLLVILWLQLSWVWSQQKEVEQDPGPLSVPEGAIVSLNCTYSNSAFQYFMWYRQYSRKGPELLMYTYSSGNKEDGRFTAQVDKSSKYISLFIRDSQPSDSATYLCAMSGLKEDSSYKLIFGSGTRLLVRPNIQNPEPAVYQLKDPRSQDSTLCLFTDFDSQINVPKTMESGTFITDKCVLDMKAMDSKSNGAIAWSNQTSFTCQDIFKETNATYPSSDVPCDATLTEKSFETDMNLNFQNLLVIVLRILLLKVAGFNLLMTLRLWSS

SEQ ID NO: 1031 - protein, 6 aa, synthetic construct
NSASQS

SEQ ID NO: 1032 - protein, 6 aa, synthetic construct
VYSSGN

SEQ ID NO: 1033 - protein, 11 aa, synthetic construct
VVQPGGYQKVT

SEQ ID NO: 1034 - protein, 111 aa, synthetic construct
QRKEVEQDPGPFNVPEGATVAFNCTYSNSASQSFFWYRQDCRKEPKLLMSVYSSGNEDGRFTAQLNRASQYISLLIRDSKLSDSATYLCVVQPGGYQKVTFGTGTKLQVIP

SEQ ID NO: 1035 - protein, 110 aa, synthetic construct
RKEVEQDPGPFNVPEGATVAFNCTYSNSASQSFFWYRQDCRKEPKLLMSVYSSGNEDGRFTAQLNRASQYISLLIRDSKLSDSATYLCVVQPGGYQKVTFGTGTKLQVIP

SEQ ID NO: 1036 - protein, 131 aa, synthetic construct
  VARIANT 2: note = X can be any Amino Acid
MXSLRVLLVILWLQLSWVWSQRKEVEQDPGPFNVPEGATVAFNCTYSNSASQSFFWYRQDCRKEPKLLMSVYSSGNEDGRFTAQLNRASQYISLLIRDSKLSDSATYLCVVQPGGYQKVTFGTGTKLQVIP

SEQ ID NO: 1037 - protein, 131 aa, synthetic construct; identical to SEQ ID NO: 1036
  VARIANT 2: note = X can be any Amino Acid

SEQ ID NO: 1038 - protein, 268 aa, synthetic construct
MISLRVLLVILWLQLSWVWSQRKEVEQDPGPFNVPEGATVAFNCTYSNSASQSFFWYRQDCRKEPKLLMSVYSSGNEDGRFTAQLNRASQYISLLIRDSKLSDSATYLCVVQPGGYQKVTFGTGTKLQVIPNIQNPEPAVYQLKDPRSQDSTLCLFTDFDSQINVPKTMESGTFITDKCVLDMKAMDSKSNGAIAWSNQTSFTCQDIFKETNATYPSSDVPCDATLTEKSFETDMNLNFQNLLVIVLRILLLKVAGFNLLMTLRLWSS

SEQ ID NO: 1039 - protein, 268 aa, synthetic construct
MASLRVLLVILWLQLSWVWSQRKEVEQDPGPFNVPEGATVAFNCTYSNSASQSFFWYRQDCRKEPKLLMSVYSSGNEDGRFTAQLNRASQYISLLIRDSKLSDSATYLCVVQPGGYQKVTFGTGTKLQVIPNIQNPEPAVYQLKDPRSQDSTLCLFTDFDSQINVPKTMESGTFITDKCVLDMKAMDSKSNGAIAWSNQTSFTCQDIFKETNATYPSSDVPCDATLTEKSFETDMNLNFQNLLVIVLRILLLKVAGFNLLMTLRLWSS

SEQ ID NO: 1040 - protein, 268 aa, synthetic construct
MHSLRVLLVILWLQLSWVWSQRKEVEQDPGPFNVPEGATVAFNCTYSNSASQSFFWYRQDCRKEPKLLMSVYSSGNEDGRFTAQLNRASQYISLLIRDSKLSDSATYLCVVQPGGYQKVTFGTGTKLQVIPNIQNPEPAVYQLKDPRSQDSTLCLFTDFDSQINVPKTMESGTFITDKCVLDMKAMDSKSNGAIAWSNQTSFTCQDIFKETNATYPSSDVPCDATLTEKSFETDMNLNFQNLLVIVLRILLLKVAGFNLLMTLRLWSS

SEQ ID NO: 1041 - protein, 7 aa, synthetic construct
TSENNYY

SEQ ID NO: 1042 - protein, 8 aa, synthetic construct
QEAYKQQN

SEQ ID NO: 1043 - protein, 14 aa, synthetic construct
AFMGYSGAGSYQLT

SEQ ID NO: 1044 - protein, 116 aa, synthetic construct
QTVTQSQPEMSVQEAETVTLSCTYDTSENNYYLFWYKQPPSRQMILVIRQEAYKQQNATENRFSVNFQKAAKSFSLKISDSQLGDTAMYFCAFMGYSGAGSYQLTFGKGTKLSVIP

SEQ ID NO: 1045 - protein, 117 aa, synthetic construct
AQTVTQSQPEMSVQEAETVTLSCTYDTSENNYYLFWYKQPPSRQMILVIRQEAYKQQNATENRFSVNFQKAAKSFSLKISDSQLGDTAMYFCAFMGYSGAGSYQLTFGKGTKLSVIP

SEQ ID NO: 1046 - protein, 137 aa, synthetic construct
  VARIANT 2: note = X can be any Amino Acid
MXRVSLLWAVVVSTCLESGMAQTVTQSQPEMSVQEAETVTLSCTYDTSENNYYLFWYKQPPSRQMILVIRQEAYKQQNATENRFSVNFQKAAKSFSLKISDSQLGDTAMYFCAFMGYSGAGSYQLTFGKGTKLSVIP

SEQ ID NO: 1047 - protein, 137 aa, synthetic construct; identical to SEQ ID NO: 1046
  VARIANT 2: note = X can be any Amino Acid

SEQ ID NO: 1048 - protein, 274 aa, synthetic construct
MTRVSLLWAVVVSTCLESGMAQTVTQSQPEMSVQEAETVTLSCTYDTSENNYYLFWYKQPPSRQMILVIRQEAYKQQNATENRFSVNFQKAAKSFSLKISDSQLGDTAMYFCAFMGYSGAGSYQLTFGKGTKLSVIPNIQNPEPAVYQLKDPRSQDSTLCLFTDFDSQINVPKTMESGTFITDKCVLDMKAMDSKSNGAIAWSNQTSFTCQDIFKETNATYPSSDVPCDATLTEKSFETDMNLNFQNLLVIVLRILLLKVAGFNLLMTLRLWSS

SEQ ID NO: 1049 - protein, 274 aa, synthetic construct
MARVSLLWAVVVSTCLESGMAQTVTQSQPEMSVQEAETVTLSCTYDTSENNYYLFWYKQPPSRQMILVIRQEAYKQQNATENRFSVNFQKAAKSFSLKISDSQLGDTAMYFCAFMGYSGAGSYQLTFGKGTKLSVIPNIQNPEPAVYQLKDPRSQDSTLCLFTDFDSQINVPKTMESGTFITDKCVLDMKAMDSKSNGAIAWSNQTSFTCQDIFKETNATYPSSDVPCDATLTEKSFETDMNLNFQNLLVIVLRILLLKVAGFNLLMTLRLWSS

SEQ ID NO: 1050 - protein, 274 aa, synthetic construct
MHRVSLLWAVVVSTCLESGMAQTVTQSQPEMSVQEAETVTLSCTYDTSENNYYLFWYKQPPSRQMILVIRQEAYKQQNATENRFSVNFQKAAKSFSLKISDSQLGDTAMYFCAFMGYSGAGSYQLTFGKGTKLSVIPNIQNPEPAVYQLKDPRSQDSTLCLFTDFDSQINVPKTMESGTFITDKCVLDMKAMDSKSNGAIAWSNQTSFTCQDIFKETNATYPSSDVPCDATLTEKSFETDMNLNFQNLLVIVLRILLLKVAGFNLLMTLRLWSS

SEQ ID NO: 1051 - protein, 7 aa, synthetic construct
TISGNEY

SEQ ID NO: 1052 - protein, 5 aa, synthetic construct
GLKNN

SEQ ID NO: 1053 - protein, 17 aa, synthetic construct
IVRGSPGAGGTSYGKLT

SEQ ID NO: 1054 - protein, 114 aa, synthetic construct
KTTQPPSMDCAEGRAANLPCNHSTISGNEYVYWYRQIHSQGPQYIIHGLKNNETNEMASLIITEDRKSSTLILPHATLRDTAVYYCIVRGSPGAGGTSYGKLTFGQGTILTVHP

SEQ ID NO: 1055 - protein, 116 aa, synthetic construct
DAKTTQPPSMDCAEGRAANLPCNHSTISGNEYVYWYRQIHSQGPQYIIHGLKNNETNEMASLIITEDRKSSTLILPHATLRDTAVYYCIVRGSPGAGGTSYGKLTFGQGTILTVHP

SEQ ID NO: 1056 - protein, 133 aa, synthetic construct
  VARIANT 2: note = X can be any Amino Acid
MXLVARVTVFLTFGTIIDAKTTQPPSMDCAEGRAANLPCNHSTISGNEYVYWYRQIHSQGPQYIIHGLKNNETNEMASLIITEDRKSSTLILPHATLRDTAVYYCIVRGSPGAGGTSYGKLTFGQGTILTVHP

SEQ ID NO: 1057 - protein, 133 aa, synthetic construct; identical to SEQ ID NO: 1056
  VARIANT 2: note = X can be any Amino Acid

SEQ ID NO: 1058 - protein, 270 aa, synthetic construct
MRLVARVTVFLTFGTIIDAKTTQPPSMDCAEGRAANLPCNHSTISGNEYVYWYRQIHSQGPQYIIHGLKNNETNEMASLIITEDRKSSTLILPHATLRDTAVYYCIVRGSPGAGGTSYGKLTFGQGTILTVHPNIQNPEPAVYQLKDPRSQDSTLCLFTDFDSQINVPKTMESGTFITDKCVLDMKAMDSKSNGAIAWSNQTSFTCQDIFKETNATYPSSDVPCDATLTEKSFETDMNLNFQNLLVIVLRILLLKVAGFNLLMTLRLWSS

SEQ ID NO: 1059 - protein, 270 aa, synthetic construct
MALVARVTVFLTFGTIIDAKTTQPPSMDCAEGRAANLPCNHSTISGNEYVYWYRQIHSQGPQYIIHGLKNNETNEMASLIITEDRKSSTLILPHATLRDTAVYYCIVRGSPGAGGTSYGKLTFGQGTILTVHPNIQNPEPAVYQLKDPRSQDSTLCLFTDFDSQINVPKTMESGTFITDKCVLDMKAMDSKSNGAIAWSNQTSFTCQDIFKETNATYPSSDVPCDATLTEKSFETDMNLNFQNLLVIVLRILLLKVAGFNLLMTLRLWSS

SEQ ID NO: 1060 - protein, 270 aa, synthetic construct
MHLVARVTVFLTFGTIIDAKTTQPPSMDCAEGRAANLPCNHSTISGNEYVYWYRQIHSQGPQYIIHGLKNNETNEMASLIITEDRKSSTLILPHATLRDTAVYYCIVRGSPGAGGTSYGKLTFGQGTILTVHPNIQNPEPAVYQLKDPRSQDSTLCLFTDFDSQINVPKTMESGTFITDKCVLDMKAMDSKSNGAIAWSNQTSFTCQDIFKETNATYPSSDVPCDATLTEKSFETDMNLNFQNLLVIVLRILLLKVAGFNLLMTLRLWSS

SEQ ID NO: 1061 - protein, 5 aa, synthetic construct
TTSDR

SEQ ID NO: 1062 - protein, 7 aa, synthetic construct
LLSNGAV

SEQ ID NO: 1063 - protein, 12 aa, synthetic construct
AVAHMDSNYQLI

SEQ ID NO: 1064 - protein, 112 aa, synthetic construct
ELKVEQNPLFLSMQEGKNYTIYCNYSTTSDRLYWYRQDPGKSLESLFVLLSNGAVKQEGRLMASLDTKARLSTLHITAAVHDLSATYFCAVAHMDSNYQLIWGAGTKLIIKP

SEQ ID NO: 1065 - protein, 112 aa, synthetic construct; identical to SEQ ID NO: 1064

SEQ ID NO: 1066 - protein, 130 aa, synthetic construct
  VARIANT 2: note = X can be any Amino Acid
MXKLLAMILWLQLDRLSGELKVEQNPLFLSMQEGKNYTIYCNYSTTSDRLYWYRQDPGKSLESLFVLLSNGAVKQEGRLMASLDTKARLSTLHITAAVHDLSATYFCAVAHMDSNYQLIWGAGTKLIIKP

SEQ ID NO: 1067 - protein, 130 aa, synthetic construct; identical to SEQ ID NO: 1066
  VARIANT 2: note = X can be any Amino Acid

SEQ ID NO: 1068 - protein, 267 aa, synthetic construct
MKKLLAMILWLQLDRLSGELKVEQNPLFLSMQEGKNYTIYCNYSTTSDRLYWYRQDPGKSLESLFVLLSNGAVKQEGRLMASLDTKARLSTLHITAAVHDLSATYFCAVAHMDSNYQLIWGAGTKLIIKPNIQNPEPAVYQLKDPRSQDSTLCLFTDFDSQINVPKTMESGTFITDKCVLDMKAMDSKSNGAIAWSNQTSFTCQDIFKETNATYPSSDVPCDATLTEKSFETDMNLNFQNLLVIVLRILLLKVAGFNLLMTLRLWSS

SEQ ID NO: 1069 - protein, 267 aa, synthetic construct
MAKLLAMILWLQLDRLSGELKVEQNPLFLSMQEGKNYTIYCNYSTTSDRLYWYRQDPGKSLESLFVLLSNGAVKQEGRLMASLDTKARLSTLHITAAVHDLSATYFCAVAHMDSNYQLIWGAGTKLIIKPNIQNPEPAVYQLKDPRSQDSTLCLFTDFDSQINVPKTMESGTFITDKCVLDMKAMDSKSNGAIAWSNQTSFTCQDIFKETNATYPSSDVPCDATLTEKSFETDMNLNFQNLLVIVLRILLLKVAGFNLLMTLRLWSS

SEQ ID NO: 1070 - protein, 267 aa, synthetic construct
MHKLLAMILWLQLDRLSGELKVEQNPLFLSMQEGKNYTIYCNYSTTSDRLYWYRQDPGKSLESLFVLLSNGAVKQEGRLMASLDTKARLSTLHITAAVHDLSATYFCAVAHMDSNYQLIWGAGTKLIIKPNIQNPEPAVYQLKDPRSQDSTLCLFTDFDSQINVPKTMESGTFITDKCVLDMKAMDSKSNGAIAWSNQTSFTCQDIFKETNATYPSSDVPCDATLTEKSFETDMNLNFQNLLVIVLRILLLKVAGFNLLMTLRLWSS

SEQ ID NO: 1071 - protein, 7 aa, synthetic construct
TISGNEY

SEQ ID NO: 1072 - protein, 5 aa, synthetic construct
GLKNN

SEQ ID NO: 1073 - protein, 17 aa, synthetic construct
IVRARANAGGTSYGKLT

SEQ ID NO: 1074 - protein, 114 aa, synthetic construct
KTTQPPSMDCAEGRAANLPCNHSTISGNEYVYWYRQIHSQGPQYIIHGLKNNETNEMASLIITEDRKSSTLILPHATLRDTAVYYCIVRARANAGGTSYGKLTFGQGTILTVHP

SEQ ID NO: 1075 - protein, 116 aa, synthetic construct
DAKTTQPPSMDCAEGRAANLPCNHSTISGNEYVYWYRQIHSQGPQYIIHGLKNNETNEMASLIITEDRKSSTLILPHATLRDTAVYYCIVRARANAGGTSYGKLTFGQGTILTVHP

SEQ ID NO: 1076 - protein, 133 aa, synthetic construct
  VARIANT 2: note = X can be any Amino Acid
MXLVARVTVFLTFGTIIDAKTTQPPSMDCAEGRAANLPCNHSTISGNEYVYWYRQIHSQGPQYIIHGLKNNETNEMASLIITEDRKSSTLILPHATLRDTAVYYCIVRARANAGGTSYGKLTFGQGTILTVHP

SEQ ID NO: 1077 - protein, 133 aa, synthetic construct; identical to SEQ ID NO: 1076
  VARIANT 2: note = X can be any Amino Acid

SEQ ID NO: 1078 - protein, 270 aa, synthetic construct
MRLVARVTVFLTFGTIIDAKTTQPPSMDCAEGRAANLPCNHSTISGNEYVYWYRQIHSQGPQYIIHGLKNNETNEMASLIITEDRKSSTLILPHATLRDTAVYYCIVRARANAGGTSYGKLTFGQGTILTVHPNIQNPEPAVYQLKDPRSQDSTLCLFTDFDSQINVPKTMESGTFITDKCVLDMKAMDSKSNGAIAWSNQTSFTCQDIFKETNATYPSSDVPCDATLTEKSFETDMNLNFQNLLVIVLRILLLKVAGFNLLMTLRLWSS

SEQ ID NO: 1079 - protein, 270 aa, synthetic construct
MALVARVTVFLTFGTIIDAKTTQPPSMDCAEGRAANLPCNHSTISGNEYVYWYRQIHSQGPQYIIHGLKNNETNEMASLIITEDRKSSTLILPHATLRDTAVYYCIVRARANAGGTSYGKLTFGQGTILTVHPNIQNPEPAVYQLKDPRSQDSTLCLFTDFDSQINVPKTMESGTFITDKCVLDMKAMDSKSNGAIAWSNQTSFTCQDIFKETNATYPSSDVPCDATLTEKSFETDMNLNFQNLLVIVLRILLLKVAGFNLLMTLRLWSS

SEQ ID NO: 1080 - protein, 270 aa, synthetic construct
MHLVARVTVFLTFGTIIDAKTTQPPSMDCAEGRAANLPCNHSTISGNEYVYWYRQIHSQGPQYIIHGLKNNETNEMASLIITEDRKSSTLILPHATLRDTAVYYCIVRARANAGGTSYGKLTFGQGTILTVHPNIQNPEPAVYQLKDPRSQDSTLCLFTDFDSQINVPKTMESGTFITDKCVLDMKAMDSKSNGAIAWSNQTSFTCQDIFKETNATYPSSDVPCDATLTEKSFETDMNLNFQNLLVIVLRILLLKVAGFNLLMTLRLWSS

SEQ ID NO: 1081 - protein, 6 aa, synthetic construct
SSNFYA

SEQ ID NO: 1082 - protein, 7 aa, synthetic construct
MTLNGDE

SEQ ID NO: 1083 - protein, 11 aa, synthetic construct
ALITGGGNKLT

SEQ ID NO: 1084 - protein, 112 aa, synthetic construct
ILNVEQSPQSLHVQEGDSTNFTCSFPSSNFYALHWYRWETAKSPEALFVMTLNGDEKKKGRISATLNTKEGYSYLYIKGSQPEDSATYLCALITGGGNKLTFGTGTQLKVEL

SEQ ID NO: 1085 - protein, 112 aa, synthetic construct; identical to SEQ ID NO: 1084

SEQ ID NO: 1086 - protein, 134 aa, synthetic construct
  VARIANT 2: note = X can be any Amino Acid
MXKNPLAAPLLILWFHLDCVSSILNVEQSPQSLHVQEGDSTNFTCSFPSSNFYALHWYRWETAKSPEALFVMTLNGDEKKKGRISATLNTKEGYSYLYIKGSQPEDSATYLCALITGGGNKLTFGTGTQLKVEL

SEQ ID NO: 1087 - protein, 134 aa, synthetic construct; identical to SEQ ID NO: 1086
  VARIANT 2: note = X can be any Amino Acid

SEQ ID NO: 1088 - protein, 271 aa, synthetic construct
MEKNPLAAPLLILWFHLDCVSSILNVEQSPQSLHVQEGDSTNFTCSFPSSNFYALHWYRWETAKSPEALFVMTLNGDEKKKGRISATLNTKEGYSYLYIKGSQPEDSATYLCALITGGGNKLTFGTGTQLKVELNIQNPEPAVYQLKDPRSQDSTLCLFTDFDSQINVPKTMESGTFITDKCVLDMKAMDSKSNGAIAWSNQTSFTCQDIFKETNATYPSSDVPCDATLTEKSFETDMNLNFQNLLVIVLRILLLKVAGFNLLMTLRLWSS

SEQ ID NO: 1089 - protein, 271 aa, synthetic construct
MAKNPLAAPLLILWFHLDCVSSILNVEQSPQSLHVQEGDSTNFTCSFPSSNFYALHWYRWETAKSPEALFVMTLNGDEKKKGRISATLNTKEGYSYLYIKGSQPEDSATYLCALITGGGNKLTFGTGTQLKVELNIQNPEPAVYQLKDPRSQDSTLCLFTDFDSQINVPKTMESGTFITDKCVLDMKAMDSKSNGAIAWSNQTSFTCQDIFKETNATYPSSDVPCDATLTEKSFETDMNLNFQNLLVIVLRILLLKVAGFNLLMTLRLWSS

SEQ ID NO: 1090 - protein, 271 aa, synthetic construct
MHKNPLAAPLLILWFHLDCVSSILNVEQSPQSLHVQEGDSTNFTCSFPSSNFYALHWYRWETAKSPEALFVMTLNGDEKKKGRISATLNTKEGYSYLYIKGSQPEDSATYLCALITGGGNKLTFGTGTQLKVELNIQNPEPAVYQLKDPRSQDSTLCLFTDFDSQINVPKTMESGTFITDKCVLDMKAMDSKSNGAIAWSNQTSFTCQDIFKETNATYPSSDVPCDATLTEKSFETDMNLNFQNLLVIVLRILLLKVAGFNLLMTLRLWSS

SEQ ID NO: 1091 - protein, 5 aa, synthetic construct
TTLSN

SEQ ID NO: 1092 - protein, 7 aa, synthetic construct
LVKSGEV

SEQ ID NO: 1093 - protein, 12 aa, synthetic construct
AGPGGAGSYQLT

SEQ ID NO: 1094 - protein, 111 aa, synthetic construct
QQVMQIPQYQHVQEGEDFTTYCNSSTTLSNIQWYKQRPGGHPVFLIQLVKSGEVKKQKRLTFQFGEAKKNSSLHITATQTTDVGTYFCAGPGGAGSYQLTFGKGTKLSVIP

SEQ ID NO: 1095 - protein, 112 aa, synthetic construct
GQQVMQIPQYQHVQEGEDFTTYCNSSTTLSNIQWYKQRPGGHPVFLIQLVKSGEVKKQKRLTFQFGEAKKNSSLHITATQTTDVGTYFCAGPGGAGSYQLTFGKGTKLSVIP

SEQ ID NO: 1096 - protein, 130 aa, synthetic construct
  VARIANT 2: note = X can be any Amino Acid
MXLITSMLVLWMQLSQVNGQQVMQIPQYQHVQEGEDFTTYCNSSTTLSNIQWYKQRPGGHPVFLIQLVKSGEVKKQKRLTFQFGEAKKNSSLHITATQTTDVGTYFCAGPGGAGSYQLTFGKGTKLSVIP

SEQ ID NO: 1097 - protein, 130 aa, synthetic construct; identical to SEQ ID NO: 1096
  VARIANT 2: note = X can be any Amino Acid

SEQ ID NO: 1098 - protein, 267 aa, synthetic construct
MLLITSMLVLWMQLSQVNGQQVMQIPQYQHVQEGEDFTTYCNSSTTLSNIQWYKQRPGGHPVFLIQLVKSGEVKKQKRLTFQFGEAKKNSSLHITATQTTDVGTYFCAGPGGAGSYQLTFGKGTKLSVIPNIQNPEPAVYQLKDPRSQDSTLCLFTDFDSQINVPKTMESGTFITDKCVLDMKAMDSKSNGAIAWSNQTSFTCQDIFKETNATYPSSDVPCDATLTEKSFETDMNLNFQNLLVIVLRILLLKVAGFNLLMTLRLWSS

SEQ ID NO: 1099 - protein, 267 aa, synthetic construct
MALITSMLVLWMQLSQVNGQQVMQIPQYQHVQEGEDFTTYCNSSTTLSNIQWYKQRPGGHPVFLIQLVKSGEVKKQKRLTFQFGEAKKNSSLHITATQTTDVGTYFCAGPGGAGSYQLTFGKGTKLSVIPNIQNPEPAVYQLKDPRSQDSTLCLFTDFDSQINVPKTMESGTFITDKCVLDMKAMDSKSNGAIAWSNQTSFTCQDIFKETNATYPSSDVPCDATLTEKSFETDMNLNFQNLLVIVLRILLLKVAGFNLLMTLRLWSS

SEQ ID NO: 1100 - protein, 267 aa, synthetic construct
MHLITSMLVLWMQLSQVNGQQVMQIPQYQHVQEGEDFTTYCNSSTTLSNIQWYKQRPGGHPVFLIQLVKSGEVKKQKRLTFQFGEAKKNSSLHITATQTTDVGTYFCAGPGGAGSYQLTFGKGTKLSVIPNIQNPEPAVYQLKDPRSQDSTLCLFTDFDSQINVPKTMESGTFITDKCVLDMKAMDSKSNGAIAWSNQTSFTCQDIFKETNATYPSSDVPCDATLTEKSFETDMNLNFQNLLVIVLRILLLKVAGFNLLMTLRLWSS

SEQ ID NO: 1101 - protein, 7 aa, synthetic construct
TISGNEY

SEQ ID NO: 1102 - protein, 5 aa, synthetic construct
GLKNN

SEQ ID NO: 1103 - protein, 17 aa, synthetic construct
IVRARANAGGTSYGKLT

SEQ ID NO: 1104 - protein, 114 aa, synthetic construct; identical to SEQ ID NO: 1074

SEQ ID NO: 1105 - protein, 116 aa, synthetic construct; identical to SEQ ID NO: 1075

SEQ ID NO: 1106 - protein, 133 aa, synthetic construct; identical to SEQ ID NO: 1076
  VARIANT 2: note = X can be any Amino Acid

SEQ ID NO: 1107 - protein, 133 aa, synthetic construct; identical to SEQ ID NO: 1076
  VARIANT 2: note = X can be any Amino Acid

SEQ ID NO: 1108 - protein, 270 aa, synthetic construct; identical to SEQ ID NO: 1078

SEQ ID NO: 1109 - protein, 270 aa, synthetic construct; identical to SEQ ID NO: 1079

SEQ ID NO: 1110 - protein, 270 aa, synthetic construct; identical to SEQ ID NO: 1080

SEQ ID NO: 1111 - protein, 6 aa, synthetic construct
VSNAYN

SEQ ID NO: 1112 - protein, 4 aa, synthetic construct
GSKP

SEQ ID NO: 1113 - protein, 11 aa, synthetic construct
AVEDRRRTALI

SEQ ID NO: 1114 - protein, 106 aa, synthetic construct
KDQVFQPSTVASSEGAVVEIFCNHSVSNAYNFFWYLHFPGCAPRLLVKGSKPSQQGRYNMTYERFSSSLLILQVREADAAVYYCAVEDRRRTALIFGKGTTLSVSS

SEQ ID NO: 1115 - protein, 106 aa, synthetic construct; identical to SEQ ID NO: 1114

SEQ ID NO: 1116 - protein, 131 aa, synthetic construct
  VARIANT 2: note = X can be any Amino Acid
MXLQSTLGAVWLGLLLNSLWKVAESKDQVFQPSTVASSEGAVVEIFCNHSVSNAYNFFWYLHFPGCAPRLLVKGSKPSQQGRYNMTYERFSSSLLILQVREADAAVYYCAVEDRRRTALIFGKGTTLSVSS

SEQ ID NO: 1117 - protein, 131 aa, synthetic construct; identical to SEQ ID NO: 1116
  VARIANT 2: note = X can be any Amino Acid

SEQ ID NO: 1118 - protein, 268 aa, synthetic construct
MALQSTLGAVWLGLLLNSLWKVAESKDQVFQPSTVASSEGAVVEIFCNHSVSNAYNFFWYLHFPGCAPRLLVKGSKPSQQGRYNMTYERFSSSLLILQVREADAAVYYCAVEDRRRTALIFGKGTTLSVSSNIQNPEPAVYQLKDPRSQDSTLCLFTDFDSQINVPKTMESGTFITDKCVLDMKAMDSKSNGAIAWSNQTSFTCQDIFKETNATYPSSDVPCDATLTEKSFETDMNLNFQNLLVIVLRILLLKVAGFNLLMTLRLWSS

SEQ ID NO: 1119 - protein, 268 aa, synthetic construct; identical to SEQ ID NO: 1118

SEQ ID NO: 1120 - protein, 268 aa, synthetic construct
MHLQSTLGAVWLGLLLNSLWKVAESKDQVFQPSTVASSEGAVVEIFCNHSVSNAYNFFWYLHFPGCAPRLLVKGSKPSQQGRYNMTYERFSSSLLILQVREADAAVYYCAVEDRRRTALIFGKGTTLSVSSNIQNPEPAVYQLKDPRSQDSTLCLFTDFDSQINVPKTMESGTFITDKCVLDMKAMDSKSNGAIAWSNQTSFTCQDIFKETNATYPSSDVPCDATLTEKSFETDMNLNFQNLLVIVLRILLLKVAGFNLLMTLRLWSS

SEQ ID NO: 1121 - protein, 7 aa, synthetic construct
TISGTDY

SEQ ID NO: 1122 - protein, 5 aa, synthetic construct
GLTSN

SEQ ID NO: 1123 - protein, 10 aa, synthetic construct
ILRDNNARLM

SEQ ID NO: 1124 - protein, 107 aa, synthetic construct
KTTQPNSMESNEEEPVHLPCNHSTISGTDYIHWYRQLPSQGPEYVIHGLTSNVNNRMASLAIAEDRKSSTLILHRATLRDAAVYYCILRDNNARLMFGDGTQLVVKP

SEQ ID NO: 1125 - protein, 109 aa, synthetic construct
DAKTTQPNSMESNEEEPVHLPCNHSTISGTDYIHWYRQLPSQGPEYVIHGLTSNVNNRMASLAIAEDRKSSTLILHRATLRDAAVYYCILRDNNARLMFGDGTQLVVKP

SEQ ID NO: 1126 - protein, 126 aa, synthetic construct
  VARIANT 2: note = X can be any Amino Acid
MXLVTSITVLLSLGIMGDAKTTQPNSMESNEEEPVHLPCNHSTISGTDYIHWYRQLPSQGPEYVIHGLTSNVNNRMASLAIAEDRKSSTLILHRATLRDAAVYYCILRDNNARLMFGDGTQLVVKP

SEQ ID NO: 1127 - protein, 126 aa, synthetic construct; identical to SEQ ID NO: 1126
  VARIANT 2: note = X can be any Amino Acid

SEQ ID NO: 1128 - protein, 263 aa, synthetic construct
MKLVTSITVLLSLGIMGDAKTTQPNSMESNEEEPVHLPCNHSTISGTDYIHWYRQLPSQGPEYVIHGLTSNVNNRMASLAIAEDRKSSTLILHRATLRDAAVYYCILRDNNARLMFGDGTQLVVKPNIQNPEPAVYQLKDPRSQDSTLCLFTDFDSQINVPKTMESGTFITDKCVLDMKAMDSKSNGAIAWSNQTSFTCQDIFKETNATYPSSDVPCDATLTEKSFETDMNLNFQNLLVIVLRILLLKVAGFNLLMTLRLWSS

SEQ ID NO: 1129 - protein, 263 aa, synthetic construct
MALVTSITVLLSLGIMGDAKTTQPNSMESNEEEPVHLPCNHSTISGTDYIHWYRQLPSQGPEYVIHGLTSNVNNRMASLAIAEDRKSSTLILHRATLRDAAVYYCILRDNNARLMFGDGTQLVVKPNIQNPEPAVYQLKDPRSQDSTLCLFTDFDSQINVPKTMESGTFITDKCVLDMKAMDSKSNGAIAWSNQTSFTCQDIFKETNATYPSSDVPCDATLTEKSFETDMNLNFQNLLVIVLRILLLKVAGFNLLMTLRLWSS

SEQ ID NO: 1130 - protein, 263 aa, synthetic construct
MHLVTSITVLLSLGIMGDAKTTQPNSMESNEEEPVHLPCNHSTISGTDYIHWYRQLPSQGPEYVIHGLTSNVNNRMASLAIAEDRKSSTLILHRATLRDAAVYYCILRDNNARLMFGDGTQLVVKPNIQNPEPAVYQLKDPRSQDSTLCLFTDFDSQINVPKTMESGTFITDKCVLDMKAMDSKSNGAIAWSNQTSFTCQDIFKETNATYPSSDVPCDATLTEKSFETDMNLNFQNLLVIVLRILLLKVAGFNLLMTLRLWSS

SEQ ID NO: 1131 - protein, 6 aa, synthetic construct
VSGNPY

SEQ ID NO: 1132 - protein, 8 aa, synthetic construct
YITGDNLV

SEQ ID NO: 1133 - protein, 15 aa, synthetic construct
AVRDGSATSGTYKYI

SEQ ID NO: 1134 - protein, 116 aa, synthetic construct
QSVAQPEDQVNVAEGNPLTVKCTYSVSGNPYLFWYVQYPNRGLQFLLKYITGDNLVKGSYGFEAEFNKSQTSFHLKKPSALVSDSALYFCAVRDGSATSGTYKYIFGTGTRLKVLA

SEQ ID NO: 1135 - protein, 117 aa, synthetic construct
AQSVAQPEDQVNVAEGNPLTVKCTYSVSGNPYLFWYVQYPNRGLQFLLKYITGDNLVKGSYGFEAEFNKSQTSFHLKKPSALVSDSALYFCAVRDGSATSGTYKYIFGTGTRLKVLA

SEQ ID NO: 1136 - protein, 136 aa, synthetic construct
  VARIANT 2: note = X can be any Amino Acid
MXSAPISMLAMLFTLSGLRAQSVAQPEDQVNVAEGNPLTVKCTYSVSGNPYLFWYVQYPNRGLQFLLKYITGDNLVKGSYGFEAEFNKSQTSFHLKKPSALVSDSALYFCAVRDGSATSGTYKYIFGTGTRLKVLA

SEQ ID NO: 1137 - protein, 136 aa, synthetic construct; identical to SEQ ID NO: 1136
  VARIANT 2: note = X can be any Amino Acid

SEQ ID NO: 1138 - protein, 273 aa, synthetic construct
MASAPISMLAMLFTLSGLRAQSVAQPEDQVNVAEGNPLTVKCTYSVSGNPYLFWYVQYPNRGLQFLLKYITGDNLVKGSYGFEAEFNKSQTSFHLKKPSALVSDSALYFCAVRDGSATSGTYKYIFGTGTRLKVLANIQNPEPAVYQLKDPRSQDSTLCLFTDFDSQINVPKTMESGTFITDKCVLDMKAMDSKSNGAIAWSNQTSFTCQDIFKETNATYPSSDVPCDATLTEKSFETDMNLNFQNLLVIVLRILLLKVAGFNLLMTLRLWSS

SEQ ID NO: 1139 - protein, 273 aa, synthetic construct; identical to SEQ ID NO: 1138

SEQ ID NO: 1140 - protein, 273 aa, synthetic construct
MHSAPISMLAMLFTLSGLRAQSVAQPEDQVNVAEGNPLTVKCTYSVSGNPYLFWYVQYPNRGLQFLLKYITGDNLVKGSYGFEAEFNKSQTSFHLKKPSALVSDSALYFCAVRDGSATSGTYKYIFGTGTRLKVLANIQNPEPAVYQLKDPRSQDSTLCLFTDFDSQINVPKTMESGTFITDKCVLDMKAMDSKSNGAIAWSNQTSFTCQDIFKETNATYPSSDVPCDATLTEKSFETDMNLNFQNLLVIVLRILLLKVAGFNLLMTLRLWSS

SEQ ID NO: 1141 - protein, 6 aa, synthetic construct
DRGSQS

SEQ ID NO: 1142 - protein, 6 aa, synthetic construct
IYSNGD

SEQ ID NO: 1143 - protein, 12 aa, synthetic construct
AWNSGGSNYKLT

SEQ ID NO: 1144 - protein, 113 aa, synthetic construct
QQKEVEQNSGPLSVPEGAIASLNCTYSDRGSQSFFWYRQYSGKSPELIMFIYSNGDKEDGRFTAQLNKASQYVSLLIRDSQPSDSATYLCAWNSGGSNYKLTFGKGTLLTVNP

SEQ ID NO: 1145 - protein, 112 aa, synthetic construct
QKEVEQNSGPLSVPEGAIASLNCTYSDRGSQSFFWYRQYSGKSPELIMFIYSNGDKEDGRFTAQLNKASQYVSLLIRDSQPSDSATYLCAWNSGGSNYKLTFGKGTLLTVNP

SEQ ID NO: 1146 - protein, 133 aa, synthetic construct
  VARIANT 2: note = X can be any Amino Acid
MXSLRVLLVILWLQLSWVWSQQKEVEQNSGPLSVPEGAIASLNCTYSDRGSQSFFWYRQYSGKSPELIMFIYSNGDKEDGRFTAQLNKASQYVSLLIRDSQPSDSATYLCAWNSGGSNYKLTFGKGTLLTVNP

SEQ ID NO: 1147 - protein, 133 aa, synthetic construct; identical to SEQ ID NO: 1146
  VARIANT 2: note = X can be any Amino Acid

SEQ ID NO: 1148 - protein, 270 aa, synthetic construct
MKSLRVLLVILWLQLSWVWSQQKEVEQNSGPLSVPEGAIASLNCTYSDRGSQSFFWYRQYSGKSPELIMFIYSNGDKEDGRFTAQLNKASQYVSLLIRDSQPSDSATYLCAWNSGGSNYKLTFGKGTLLTVNPNIQNPEPAVYQLKDPRSQDSTLCLFTDFDSQINVPKTMESGTFITDKCVLDMKAMDSKSNGAIAWSNQTSFTCQDIFKETNATYPSSDVPCDATLTEKSFETDMNLNFQNLLVIVLRILLLKVAGFNLLMTLRLWSS

SEQ ID NO: 1149 - protein, 270 aa, synthetic construct
MASLRVLLVILWLQLSWVWSQQKEVEQNSGPLSVPEGAIASLNCTYSDRGSQSFFWYRQYSGKSPELIMFIYSNGDKEDGRFTAQLNKASQYVSLLIRDSQPSDSATYLCAWNSGGSNYKLTFGKGTLLTVNPNIQNPEPAVYQLKDPRSQDSTLCLFTDFDSQINVPKTMESGTFITDKCVLDMKAMDSKSNGAIAWSNQTSFTCQDIFKETNATYPSSDVPCDATLTEKSFETDMNLNFQNLLVIVLRILLLKVAGFNLLMTLRLWSS

SEQ ID NO: 1150 - protein, 270 aa, synthetic construct
MHSLRVLLVILWLQLSWVWSQQKEVEQNSGPLSVPEGAIASLNCTYSDRGSQSFFWYRQYSGKSPELIMFIYSNGDKEDGRFTAQLNKASQYVSLLIRDSQPSDSATYLCAWNSGGSNYKLTFGKGTLLTVNPNIQNPEPAVYQLKDPRSQDSTLCLFTDFDSQINVPKTMESGTFITDKCVLDMKAMDSKSNGAIAWSNQTSFTCQDIFKETNATYPSSDVPCDATLTEKSFETDMNLNFQNLLVIVLRILLLKVAGFNLLMTLRLWSS

SEQ ID NO: 1151 - protein, 6 aa, synthetic construct
VSGNPY

SEQ ID NO: 1152 - protein, 8 aa, synthetic construct
YITGDNLV

SEQ ID NO: 1153 - protein, 10 aa, synthetic construct
AVRVWDYKLS

SEQ ID NO: 1154 - protein, 111 aa, synthetic construct
QSVAQPEDQVNVAEGNPLTVKCTYSVSGNPYLFWYVQYPNRGLQFLLKYITGDNLVKGSYGFEAEFNKSQTSFHLKKPSALVSDSALYFCAVRVWDYKLSFGAGTTVTVRA

SEQ ID NO: 1155 - protein, 112 aa, synthetic construct
AQSVAQPEDQVNVAEGNPLTVKCTYSVSGNPYLFWYVQYPNRGLQFLLKYITGDNLVKGSYGFEAEFNKSQTSFHLKKPSALVSDSALYFCAVRVWDYKLSFGAGTTVTVRA

SEQ ID NO: 1156 - protein, 131 aa, synthetic construct
  VARIANT 2: note = X can be any Amino Acid
MXSAPISMLAMLFTLSGLRAQSVAQPEDQVNVAEGNPLTVKCTYSVSGNPYLFWYVQYPNRGLQFLLKYITGDNLVKGSYGFEAEFNKSQTSFHLKKPSALVSDSALYFCAVRVWDYKLSFGAGTTVTVRA

SEQ ID NO: 1157 - protein, 131 aa, synthetic construct; identical to SEQ ID NO: 1156
  VARIANT 2: note = X can be any Amino Acid

SEQ ID NO: 1158 - protein, 268 aa, synthetic construct
MASAPISMLAMLFTLSGLRAQSVAQPEDQVNVAEGNPLTVKCTYSVSGNPYLFWYVQYPNRGLQFLLKYITGDNLVKGSYGFEAEFNKSQTSFHLKKPSALVSDSALYFCAVRVWDYKLSFGAGTTVTVRANIQNPEPAVYQLKDPRSQDSTLCLFTDFDSQINVPKTMESGTFITDKCVLDMKAMDSKSNGAIAWSNQTSFTCQDIFKETNATYPSSDVPCDATLTEKSFETDMNLNFQNLLVIVLRILLLKVAGFNLLMTLRLWSS

SEQ ID NO: 1159 - protein, 268 aa, synthetic construct; identical to SEQ ID NO: 1158

SEQ ID NO: 1160 - protein, 268 aa, synthetic construct
MHSAPISMLAMLFTLSGLRAQSVAQPEDQVNVAEGNPLTVKCTYSVSGNPYLFWYVQYPNRGLQFLLKYITGDNLVKGSYGFEAEFNKSQTSFHLKKPSALVSDSALYFCAVRVWDYKLSFGAGTTVTVRANIQNPEPAVYQLKDPRSQDSTLCLFTDFDSQINVPKTMESGTFITDKCVLDMKAMDSKSNGAIAWSNQTSFTCQDIFKETNATYPSSDVPCDATLTEKSFETDMNLNFQNLLVIVLRILLLKVAGFNLLMTLRLWSS

SEQ ID NO: 1161 - protein, 6 aa, synthetic construct
TSGFNG

SEQ ID NO: 1162 - protein, 6 aa, synthetic construct
NVLDGL

SEQ ID NO: 1163 - protein, 11 aa, synthetic construct
AVKWTGGFKTI

SEQ ID NO: 1164 - protein, 109 aa, synthetic construct
QNIDQPTEMTATEGAIVQINCTYQTSGFNGLFWYQQHAGEAPTFLSYNVLDGLEEKGRFSSFLSRSKGYSYLLLKELQMKDSASYLCAVKWTGGFKTIFGAGTRLFVKA

SEQ ID NO: 1165 - protein, 110 aa, synthetic construct
GQNIDQPTEMTATEGAIVQINCTYQTSGFNGLFWYQQHAGEAPTFLSYNVLDGLEEKGRFSSFLSRSKGYSYLLLKELQMKDSASYLCAVKWTGGFKTIFGAGTRLFVKA

SEQ ID NO: 1166 - protein, 127 aa, synthetic construct
  VARIANT 2: note = X can be any Amino Acid
MXGVFLLYVSMKMGGTTGQNIDQPTEMTATEGAIVQINCTYQTSGFNGLFWYQQHAGEAPTFLSYNVLDGLEEKGRFSSFLSRSKGYSYLLLKELQMKDSASYLCAVKWTGGFKTIFGAGTRLFVKA

SEQ ID NO: 1167 - protein, 127 aa, synthetic construct; identical to SEQ ID NO: 1166
  VARIANT 2: note = X can be any Amino Acid

SEQ ID NO: 1168 - protein, 264 aa, synthetic construct
MWGVFLLYVSMKMGGTTGQNIDQPTEMTATEGAIVQINCTYQTSGFNGLFWYQQHAGEAPTFLSYNVLDGLEEKGRFSSFLSRSKGYSYLLLKELQMKDSASYLCAVKWTGGFKTIFGAGTRLFVKANIQNPEPAVYQLKDPRSQDSTLCLFTDFDSQINVPKTMESGTFITDKCVLDMKAMDSKSNGAIAWSNQTSFTCQDIFKETNATYPSSDVPCDATLTEKSFETDMNLNFQNLLVIVLRILLLKVAGFNLLMTLRLWSS

SEQ ID NO: 1169 - protein, 264 aa, synthetic construct
MAGVFLLYVSMKMGGTTGQNIDQPTEMTATEGAIVQINCTYQTSGFNGLFWYQQHAGEAPTFLSYNVLDGLEEKGRFSSFLSRSKGYSYLLLKELQMKDSASYLCAVKWTGGFKTIFGAGTRLFVKANIQNPEPAVYQLKDPRSQDSTLCLFTDFDSQINVPKTMESGTFITDKCVLDMKAMDSKSNGAIAWSNQTSFTCQDIFKETNATYPSSDVPCDATLTEKSFETDMNLNFQNLLVIVLRILLLKVAGFNLLMTLRLWSS

SEQ ID NO: 1170 - protein, 264 aa, synthetic construct
MHGVFLLYVSMKMGGTTGQNIDQPTEMTATEGAIVQINCTYQTSGFNGLFWYQQHAGEAPTFLSYNVLDGLEEKGRFSSFLSRSKGYSYLLLKELQMKDSASYLCAVKWTGGFKTIFGAGTRLFVKANIQNPEPAVYQLKDPRSQDSTLCLFTDFDSQINVPKTMESGTFITDKCVLDMKAMDSKSNGAIAWSNQTSFTCQDIFKETNATYPSSDVPCDATLTEKSFETDMNLNFQNLLVIVLRILLLKVAGFNLLMTLRLWSS

SEQ ID NO: 1171 - protein, 6 aa, synthetic construct
YGGTVN

SEQ ID NO: 1172 - protein, 8 aa, synthetic construct
YFSGDPLV

SEQ ID NO: 1173 - protein, 9 aa, synthetic construct
AVKGDYKLS

SEQ ID NO: 1174 - protein, 110 aa, synthetic construct
QSVSQHNHHVILSEAASLELGCNYSYGGTVNLFWYVQYPGQHLQLLLKYFSGDPLVKGIKGFEAEFIKSKFSFNLRKPSVQWSDTAEYFCAVKGDYKLSFGAGTTVTVRA

SEQ ID NO: 1175 - protein, 111 aa, synthetic construct
AQSVSQHNHHVILSEAASLELGCNYSYGGTVNLFWYVQYPGQHLQLLLKYFSGDPLVKGIKGFEAEFIKSKFSFNLRKPSVQWSDTAEYFCAVKGDYKLSFGAGTTVTVRA

SEQ ID NO: 1176 - protein, 130 aa, synthetic construct
  VARIANT 2: note = X can be any Amino Acid
MXLLLIPVLGMIFALRDARAQSVSQHNHHVILSEAASLELGCNYSYGGTVNLFWYVQYPGQHLQLLLKYFSGDPLVKGIKGFEAEFIKSKFSFNLRKPSVQWSDTAEYFCAVKGDYKLSFGAGTTVTVRA

SEQ ID NO: 1177 - protein, 130 aa, synthetic construct; identical to SEQ ID NO: 1176
  VARIANT 2: note = X can be any Amino Acid

SEQ ID NO: 1178 - protein, 267 aa, synthetic construct
MLLLLIPVLGMIFALRDARAQSVSQHNHHVILSEAASLELGCNYSYGGTVNLFWYVQYPGQHLQLLLKYFSGDPLVKGIKGFEAEFIKSKFSFNLRKPSVQWSDTAEYFCAVKGDYKLSFGAGTTVTVRANIQNPEPAVYQLKDPRSQDSTLCLFTDFDSQINVPKTMESGTFITDKCVLDMKAMDSKSNGAIAWSNQTSFTCQDIFKETNATYPSSDVPCDATLTEKSFETDMNLNFQNLLVIVLRILLLKVAGFNLLMTLRLWSS

SEQ ID NO: 1179 - protein, 267 aa, synthetic construct
MALLLIPVLGMIFALRDARAQSVSQHNHHVILSEAASLELGCNYSYGGTVNLFWYVQYPGQHLQLLLKYFSGDPLVKGIKGFEAEFIKSKFSFNLRKPSVQWSDTAEYFCAVKGDYKLSFGAGTTVTVRANIQNPEPAVYQLKDPRSQDSTLCLFTDFDSQINVPKTMESGTFITDKCVLDMKAMDSKSNGAIAWSNQTSFTCQDIFKETNATYPSSDVPCDATLTEKSFETDMNLNFQNLLVIVLRILLLKVAGFNLLMTLRLWSS

SEQ ID NO: 1180 - protein, 267 aa, synthetic construct
MHLLLIPVLGMIFALRDARAQSVSQHNHHVILSEAASLELGCNYSYGGTVNLFWYVQYPGQHLQLLLKYFSGDPLVKGIKGFEAEFIKSKFSFNLRKPSVQWSDTAEYFCAVKGDYKLSFGAGTTVTVRANIQNPEPAVYQLKDPRSQDSTLCLFTDFDSQINVPKTMESGTFITDKCVLDMKAMDSKSNGAIAWSNQTSFTCQDIFKETNATYPSSDVPCDATLTEKSFETDMNLNFQNLLVIVLRILLLKVAGFNLLMTLRLWSS

SEQ ID NO: 1181 - protein, 7 aa, synthetic construct
TRDTTYY

SEQ ID NO: 1182 - protein, 8 aa, synthetic construct
RNSFDEQN

SEQ ID NO: 1183 - protein, 12 aa, synthetic construct
ALSEGGSNYKLT

SEQ ID NO: 1184 - protein, 114 aa, synthetic construct
QKVTQAQTEISVVEKEDVTLDCVYETRDTTYYLFWYKQPPSGELVFLIRRNSFDEQNEISGRYSWNFQKSTSSFNFTITASQVVDSAVYFCALSEGGSNYKLTFGKGTLLTVNP

SEQ ID NO: 1185 - protein, 115 aa, synthetic construct
AQKVTQAQTEISVVEKEDVTLDCVYETRDTTYYLFWYKQPPSGELVFLIRRNSFDEQNEISGRYSWNFQKSTSSFNFTITASQVVDSAVYFCALSEGGSNYKLTFGKGTLLTVNP

SEQ ID NO: 1186 - protein, 135 aa, synthetic construct
  VARIANT 2: note = X can be any Amino Acid
MXTASLLRAVIASICVVSSMAQKVTQAQTEISVVEKEDVTLDCVYETRDTTYYLFWYKQPPSGELVFLIRRNSFDEQNEISGRYSWNFQKSTSSFNFTITASQVVDSAVYFCALSEGGSNYKLTFGKGTLLTVNP

SEQ ID NO: 1187 - protein, 135 aa, synthetic construct; identical to SEQ ID NO: 1186
  VARIANT 2: note = X can be any Amino Acid

SEQ ID NO: 1188 - protein, 272 aa, synthetic construct
MLTASLLRAVIASICVVSSMAQKVTQAQTEISVVEKEDVTLDCVYETRDTTYYLFWYKQPPSGELVFLIRRNSFDEQNEISGRYSWNFQKSTSSFNFTITASQVVDSAVYFCALSEGGSNYKLTFGKGTLLTVNPNIQNPEPAVYQLKDPRSQDSTLCLFTDFDSQINVPKTMESGTFITDKCVLDMKAMDSKSNGAIAWSNQTSFTCQDIFKETNATYPSSDVPCDATLTEKSFETDMNLNFQNLLVIVLRILLLKVAGFNLLMTLRLWSS

SEQ ID NO: 1189 - protein, 272 aa, synthetic construct
MATASLLRAVIASICVVSSMAQKVTQAQTEISVVEKEDVTLDCVYETRDTTYYLFWYKQPPSGELVFLIRRNSFDEQNEISGRYSWNFQKSTSSFNFTITASQVVDSAVYFCALSEGGSNYKLTFGKGTLLTVNPNIQNPEPAVYQLKDPRSQDSTLCLFTDFDSQINVPKTMESGTFITDKCVLDMKAMDSKSNGAIAWSNQTSFTCQDIFKETNATYPSSDVPCDATLTEKSFETDMNLNFQNLLVIVLRILLLKVAGFNLLMTLRLWSS

SEQ ID NO: 1190 - protein, 272 aa, synthetic construct
MHTASLLRAVIASICVVSSMAQKVTQAQTEISVVEKEDVTLDCVYETRDTTYYLFWYKQPPSGELVFLIRRNSFDEQNEISGRYSWNFQKSTSSFNFTITASQVVDSAVYFCALSEGGSNYKLTFGKGTLLTVNPNIQNPEPAVYQLKDPRSQDSTLCLFTDFDSQINVPKTMESGTFITDKCVLDMKAMDSKSNGAIAWSNQTSFTCQDIFKETNATYPSSDVPCDATLTEKSFETDMNLNFQNLLVIVLRILLLKVAGFNLLMTLRLWSS

SEQ ID NO: 1191 - protein, 6 aa, synthetic construct
DRGSQS

SEQ ID NO: 1192 - protein, 6 aa, synthetic construct
IYSNGD

SEQ ID NO: 1193 - protein, 10 aa, synthetic construct
AVNDAGNMLT

SEQ ID NO: 1194 - protein, 111 aa, synthetic construct
QQKEVEQNSGPLSVPEGAIASLNCTYSDRGSQSFFWYRQYSGKSPELIMFIYSNGDKEDGRFTAQLNKASQYVSLLIRDSQPSDSATYLCAVNDAGNMLTFGGGTRLMVKP

SEQ ID NO: 1195 - protein, 110 aa, synthetic construct
QKEVEQNSGPLSVPEGAIASLNCTYSDRGSQSFFWYRQYSGKSPELIMFIYSNGDKEDGRFTAQLNKASQYVSLLIRDSQPSDSATYLCAVNDAGNMLTFGGGTRLMVKP

SEQ ID NO: 1196 - protein, 131 aa, synthetic construct
  VARIANT 2: note = X can be any Amino Acid
MXSLRVLLVILWLQLSWVWSQQKEVEQNSGPLSVPEGAIASLNCTYSDRGSQSFFWYRQYSGKSPELIMFIYSNGDKEDGRFTAQLNKASQYVSLLIRDSQPSDSATYLCAVNDAGNMLTFGGGTRLMVKP

SEQ ID NO: 1197 - protein, 131 aa, synthetic construct; identical to SEQ ID NO: 1196
  VARIANT 2: note = X can be any Amino Acid

SEQ ID NO: 1198 - protein, 268 aa, synthetic construct
MKSLRVLLVILWLQLSWVWSQQKEVEQNSGPLSVPEGAIASLNCTYSDRGSQSFFWYRQYSGKSPELIMFIYSNGDKEDGRFTAQLNKASQYVSLLIRDSQPSDSATYLCAVNDAGNMLTFGGGTRLMVKPNIQNPEPAVYQLKDPRSQDSTLCLFTDFDSQINVPKTMESGTFITDKCVLDMKAMDSKSNGAIAWSNQTSFTCQDIFKETNATYPSSDVPCDATLTEKSFETDMNLNFQNLLVIVLRILLLKVAGFNLLMTLRLWSS

SEQ ID NO: 1199 - protein, 268 aa, synthetic construct
MASLRVLLVILWLQLSWVWSQQKEVEQNSGPLSVPEGAIASLNCTYSDRGSQSFFWYRQYSGKSPELIMFIYSNGDKEDGRFTAQLNKASQYVSLLIRDSQPSDSATYLCAVNDAGNMLTFGGGTRLMVKPNIQNPEPAVYQLKDPRSQDSTLCLFTDFDSQINVPKTMESGTFITDKCVLDMKAMDSKSNGAIAWSNQTSFTCQDIFKETNATYPSSDVPCDATLTEKSFETDMNLNFQNLLVIVLRILLLKVAGFNLLMTLRLWSS

SEQ ID NO: 1200 - protein, 268 aa, synthetic construct
MHSLRVLLVILWLQLSWVWSQQKEVEQNSGPLSVPEGAIASLNCTYSDRGSQSFFWYRQYSGKSPELIMFIYSNGDKEDGRFTAQLNKASQYVSLLIRDSQPSDSATYLCAVNDAGNMLTFGGGTRLMVKPNIQNPEPAVYQLKDPRSQDSTLCLFTDFDSQINVPKTMESGTFITDKCVLDMKAMDSKSNGAIAWSNQTSFTCQDIFKETNATYPSSDVPCDATLTEKSFETDMNLNFQNLLVIVLRILLLKVAGFNLLMTLRLWSS

SEQ ID NO: 1201 - protein, 7 aa, synthetic construct
TRDTTYY

SEQ ID NO: 1202 - protein, 8 aa, synthetic construct
RNSFDEQN

SEQ ID NO: 1203 - protein, 13 aa, synthetic construct
ALSEVDSGNTPLV

SEQ ID NO: 1204 - protein, 115 aa, synthetic construct
QKVTQAQTEISVVEKEDVTLDCVYETRDTTYYLFWYKQPPSGELVFLIRRNSFDEQNEISGRYSWNFQKSTSSFNFTITASQVVDSAVYFCALSEVDSGNTPLVFGKGTRLSVIA

SEQ ID NO: 1205 - protein, 116 aa, synthetic construct
AQKVTQAQTEISVVEKEDVTLDCVYETRDTTYYLFWYKQPPSGELVFLIRRNSFDEQNEISGRYSWNFQKSTSSFNFTITASQVVDSAVYFCALSEVDSGNTPLVFGKGTRLSVIA

SEQ ID NO: 1206 - protein, 136 aa, synthetic construct
  VARIANT 2: note = X can be any Amino Acid
MXTASLLRAVIASICVVSSMAQKVTQAQTEISVVEKEDVTLDCVYETRDTTYYLFWYKQPPSGELVFLIRRNSFDEQNEISGRYSWNFQKSTSSFNFTITASQVVDSAVYFCALSEVDSGNTPLVFGKGTRLSVIA

SEQ ID NO: 1207 - protein, 136 aa, synthetic construct; identical to SEQ ID NO: 1206
  VARIANT 2: note = X can be any Amino Acid

SEQ ID NO: 1208 - protein, 273 aa, synthetic construct
MLTASLLRAVIASICVVSSMAQKVTQAQTEISVVEKEDVTLDCVYETRDTTYYLFWYKQPPSGELVFLIRRNSFDEQNEISGRYSWNFQKSTSSFNFTITASQVVDSAVYFCALSEVDSGNTPLVFGKGTRLSVIANIQNPEPAVYQLKDPRSQDSTLCLFTDFDSQINVPKTMESGTFITDKCVLDMKAMDSKSNGAIAWSNQTSFTCQDIFKETNATYPSSDVPCDATLTEKSFETDMNLNFQNLLVIVLRILLLKVAGFNLLMTLRLWSS

SEQ ID NO: 1209 - protein, 273 aa, synthetic construct
MATASLLRAVIASICVVSSMAQKVTQAQTEISVVEKEDVTLDCVYETRDTTYYLFWYKQPPSGELVFLIRRNSFDEQNEISGRYSWNFQKSTSSFNFTITASQVVDSAVYFCALSEVDSGNTPLVFGKGTRLSVIANIQNPEPAVYQLKDPRSQDSTLCLFTDFDSQINVPKTMESGTFITDKCVLDMKAMDSKSNGAIAWSNQTSFTCQDIFKETNATYPSSDVPCDATLTEKSFETDMNLNFQNLLVIVLRILLLKVAGFNLLMTLRLWSS

SEQ ID NO: 1210 - protein, 273 aa, synthetic construct
MHTASLLRAVIASICVVSSMAQKVTQAQTEISVVEKEDVTLDCVYETRDTTYYLFWYKQPPSGELVFLIRRNSFDEQNEISGRYSWNFQKSTSSFNFTITASQVVDSAVYFCALSEVDSGNTPLVFGKGTRLSVIANIQNPEPAVYQLKDPRSQDSTLCLFTDFDSQINVPKTMESGTFITDKCVLDMKAMDSKSNGAIAWSNQTSFTCQDIFKETNATYPSSDVPCDATLTEKSFETDMNLNFQNLLVIVLRILLLKVAGFNLLMTLRLWSS

SEQ ID NO: 1211-1220 - skipped (10 entries)

SEQ ID NO: 1221 - protein, 6 aa, synthetic construct
NSAFQY

SEQ ID NO: 1222 - protein, 6 aa, synthetic construct
TYSSGN

SEQ ID NO: 1223 - protein, 12 aa, synthetic construct
AMTSPYNNNDMR

SEQ ID NO: 1224 - protein, 113 aa, synthetic construct
QQKEVEQDPGPLSVPEGAIVSLNCTYSNSAFQYFMWYRQYSRKGPELLMYTYSSGNKEDGRFTAQVDKSSKYISLFIRDSQPSDSATYLCAMTSPYNNNDMRFGAGTRLTVKP

SEQ ID NO: 1225 - protein, 112 aa, synthetic construct
QKEVEQDPGPLSVPEGAIVSLNCTYSNSAFQYFMWYRQYSRKGPELLMYTYSSGNKEDGRFTAQVDKSSKYISLFIRDSQPSDSATYLCAMTSPYNNNDMRFGAGTRLTVKP

SEQ ID NO: 1226 - protein, 134 aa, synthetic construct
  VARIANT 2: note = X can be any Amino Acid
MXKSLRVLLVILWLQLSWVWSQQKEVEQDPGPLSVPEGAIVSLNCTYSNSAFQYFMWYRQYSRKGPELLMYTYSSGNKEDGRFTAQVDKSSKYISLFIRDSQPSDSATYLCAMTSPYNNNDMRFGAGTRLTVKP

SEQ ID NO: 1227 - protein, 134 aa, synthetic construct; identical to SEQ ID NO: 1226
  VARIANT 2: note = X can be any Amino Acid

SEQ ID NO: 1228 - protein, 271 aa, synthetic construct
MCKSLRVLLVILWLQLSWVWSQQKEVEQDPGPLSVPEGAIVSLNCTYSNSAFQYFMWYRQYSRKGPELLMYTYSSGNKEDGRFTAQVDKSSKYISLFIRDSQPSDSATYLCAMTSPYNNNDMRFGAGTRLTVKPNIQNPEPAVYQLKDPRSQDSTLCLFTDFDSQINVPKTMESGTFITDKCVLDMKAMDSKSNGAIAWSNQTSFTCQDIFKETNATYPSSDVPCDATLTEKSFETDMNLNFQNLLVIVLRILLLKVAGFNLLMTLRLWSS

SEQ ID NO: 1229 - protein, 271 aa, synthetic construct
MAKSLRVLLVILWLQLSWVWSQQKEVEQDPGPLSVPEGAIVSLNCTYSNSAFQYFMWYRQYSRKGPELLMYTYSSGNKEDGRFTAQVDKSSKYISLFIRDSQPSDSATYLCAMTSPYNNNDMRFGAGTRLTVKPNIQNPEPAVYQLKDPRSQDSTLCLFTDFDSQINVPKTMESGTFITDKCVLDMKAMDSKSNGAIAWSNQTSFTCQDIFKETNATYPSSDVPCDATLTEKSFETDMNLNFQNLLVIVLRILLLKVAGFNLLMTLRLWSS

SEQ ID NO: 1230 - protein, 271 aa, synthetic construct
MHKSLRVLLVILWLQLSWVWSQQKEVEQDPGPLSVPEGAIVSLNCTYSNSAFQYFMWYRQYSRKGPELLMYTYSSGNKEDGRFTAQVDKSSKYISLFIRDSQPSDSATYLCAMTSPYNNNDMRFGAGTRLTVKPNIQNPEPAVYQLKDPRSQDSTLCLFTDFDSQINVPKTMESGTFITDKCVLDMKAMDSKSNGAIAWSNQTSFTCQDIFKETNATYPSSDVPCDATLTEKSFETDMNLNFQNLLVIVLRILLLKVAGFNLLMTLRLWSS

SEQ ID NO: 1231 - protein, 6 aa, synthetic construct
NSAFQY

SEQ ID NO: 1232 - protein, 6 aa, synthetic construct
TYSSGN

SEQ ID NO: 1233 - protein, 12 aa, synthetic construct
AMTSPYNNNDMR

SEQ ID NO: 1234 - protein, 113 aa, synthetic construct; identical to SEQ ID NO: 1224

SEQ ID NO: 1235 - protein, 112 aa, synthetic construct; identical to SEQ ID NO: 1225

SEQ ID NO: 1236 - protein, 134 aa, synthetic construct; identical to SEQ ID NO: 1226
  VARIANT 2: note = X can be any Amino Acid

SEQ ID NO: 1237 - protein, 134 aa, synthetic construct; identical to SEQ ID NO: 1226
  VARIANT 2: note = X can be any Amino Acid

SEQ ID NO: 1238 - protein, 271 aa, synthetic construct; identical to SEQ ID NO: 1228

SEQ ID NO: 1239 - protein, 271 aa, synthetic construct; identical to SEQ ID NO: 1229

SEQ ID NO: 1240 - protein, 271 aa, synthetic construct; identical to SEQ ID NO: 1230

SEQ ID NO: 1241 - protein, 7 aa, synthetic construct
TISGNEY

SEQ ID NO: 1242 - protein, 5 aa, synthetic construct
GLKNN

SEQ ID NO: 1243 - protein, 9 aa, synthetic construct
IVPNDYKLS

SEQ ID NO: 1244 - protein, 106 aa, synthetic construct
KTTQPPSMDCAEGRAANLPCNHSTISGNEYVYWYRQIHSQGPQYIIHGLKNNETNEMASLIITEDRKSSTLILPHATLRDTAVYYCIVPNDYKLSFGAGTTVTVRA

SEQ ID NO: 1245 - protein, 108 aa, synthetic construct
DAKTTQPPSMDCAEGRAANLPCNHSTISGNEYVYWYRQIHSQGPQYIIHGLKNNETNEMASLIITEDRKSSTLILPHATLRDTAVYYCIVPNDYKLSFGAGTTVTVRA

SEQ ID NO: 1246 - protein, 125 aa, synthetic construct
  VARIANT 2: note = X can be any Amino Acid
MXLVARVTVFLTFGTIIDAKTTQPPSMDCAEGRAANLPCNHSTISGNEYVYWYRQIHSQGPQYIIHGLKNNETNEMASLIITEDRKSSTLILPHATLRDTAVYYCIVPNDYKLSFGAGTTVTVRA

SEQ ID NO: 1247 - protein, 125 aa, synthetic construct; identical to SEQ ID NO: 1246
  VARIANT 2: note = X can be any Amino Acid

SEQ ID NO: 1248 - protein, 262 aa, synthetic construct
MRLVARVTVFLTFGTIIDAKTTQPPSMDCAEGRAANLPCNHSTISGNEYVYWYRQIHSQGPQYIIHGLKNNETNEMASLIITEDRKSSTLILPHATLRDTAVYYCIVPNDYKLSFGAGTTVTVRANIQNPEPAVYQLKDPRSQDSTLCLFTDFDSQINVPKTMESGTFITDKCVLDMKAMDSKSNGAIAWSNQTSFTCQDIFKETNATYPSSDVPCDATLTEKSFETDMNLNFQNLLVIVLRILLLKVAGFNLLMTLRLWSS

SEQ ID NO: 1249 - protein, 262 aa, synthetic construct
MALVARVTVFLTFGTIIDAKTTQPPSMDCAEGRAANLPCNHSTISGNEYVYWYRQIHSQGPQYIIHGLKNNETNEMASLIITEDRKSSTLILPHATLRDTAVYYCIVPNDYKLSFGAGTTVTVRANIQNPEPAVYQLKDPRSQDSTLCLFTDFDSQINVPKTMESGTFITDKCVLDMKAMDSKSNGAIAWSNQTSFTCQDIFKETNATYPSSDVPCDATLTEKSFETDMNLNFQNLLVIVLRILLLKVAGFNLLMTLRLWSS

SEQ ID NO: 1250 - protein, 262 aa, synthetic construct
MHLVARVTVFLTFGTIIDAKTTQPPSMDCAEGRAANLPCNHSTISGNEYVYWYRQIHSQGPQYIIHGLKNNETNEMASLIITEDRKSSTLILPHATLRDTAVYYCIVPNDYKLSFGAGTTVTVRANIQNPEPAVYQLKDPRSQDSTLCLFTDFDSQINVPKTMESGTFITDKCVLDMKAMDSKSNGAIAWSNQTSFTCQDIFKETNATYPSSDVPCDATLTEKSFETDMNLNFQNLLVIVLRILLLKVAGFNLLMTLRLWSS

SEQ ID NO: 1251 - protein, 6 aa, synthetic construct
ATGYPS

SEQ ID NO: 1252 - protein, 7 aa, synthetic construct
ATKADDK

SEQ ID NO: 1253 - protein, 15 aa, synthetic construct
ALNPNAGGTSYGKLT

SEQ ID NO: 1254 - protein, 115 aa, synthetic construct
NSVTQMEGPVTLSEEAFLTINCTYTATGYPSLFWYVQYPGEGLQLLLKATKADDKGSNKGFEATYRKETTSFHLEKGSVQVSDSAVYFCALNPNAGGTSYGKLTFGQGTILTVHP

SEQ ID NO: 1255 - protein, 116 aa, synthetic construct
GNSVTQMEGPVTLSEEAFLTINCTYTATGYPSLFWYVQYPGEGLQLLLKATKADDKGSNKGFEATYRKETTSFHLEKGSVQVSDSAVYFCALNPNAGGTSYGKLTFGQGTILTVHP

SEQ ID NO: 1256 - protein, 135 aa, synthetic construct
  VARIANT 2: note = X can be any Amino Acid
MXYSPGLVSLILLLLGRTRGNSVTQMEGPVTLSEEAFLTINCTYTATGYPSLFWYVQYPGEGLQLLLKATKADDKGSNKGFEATYRKETTSFHLEKGSVQVSDSAVYFCALNPNAGGTSYGKLTFGQGTILTVHP

SEQ ID NO: 1257 - protein, 135 aa, synthetic construct; identical to SEQ ID NO: 1256
  VARIANT 2: note = X can be any Amino Acid

SEQ ID NO: 1258 - protein, 272 aa, synthetic construct
MNYSPGLVSLILLLLGRTRGNSVTQMEGPVTLSEEAFLTINCTYTATGYPSLFWYVQYPGEGLQLLLKATKADDKGSNKGFEATYRKETTSFHLEKGSVQVSDSAVYFCALNPNAGGTSYGKLTFGQGTILTVHPNIQNPEPAVYQLKDPRSQDSTLCLFTDFDSQINVPKTMESGTFITDKCVLDMKAMDSKSNGAIAWSNQTSFTCQDIFKETNATYPSSDVPCDATLTEKSFETDMNLNFQNLLVIVLRILLLKVAGFNLLMTLRLWSS

SEQ ID NO: 1259 - protein, 272 aa, synthetic construct
MAYSPGLVSLILLLLGRTRGNSVTQMEGPVTLSEEAFLTINCTYTATGYPSLFWYVQYPGEGLQLLLKATKADDKGSNKGFEATYRKETTSFHLEKGSVQVSDSAVYFCALNPNAGGTSYGKLTFGQGTILTVHPNIQNPEPAVYQLKDPRSQDSTLCLFTDFDSQINVPKTMESGTFITDKCVLDMKAMDSKSNGAIAWSNQTSFTCQDIFKETNATYPSSDVPCDATLTEKSFETDMNLNFQNLLVIVLRILLLKVAGFNLLMTLRLWSS

SEQ ID NO: 1260 - protein, 272 aa, synthetic construct
MHYSPGLVSLILLLLGRTRGNSVTQMEGPVTLSEEAFLTINCTYTATGYPSLFWYVQYPGEGLQLLLKATKADDKGSNKGFEATYRKETTSFHLEKGSVQVSDSAVYFCALNPNAGGTSYGKLTFGQGTILTVHPNIQNPEPAVYQLKDPRSQDSTLCLFTDFDSQINVPKTMESGTFITDKCVLDMKAMDSKSNGAIAWSNQTSFTCQDIFKETNATYPSSDVPCDATLTEKSFETDMNLNFQNLLVIVLRILLLKVAGFNLLMTLRLWSS

SEQ ID NO: 1261 - protein, 6 aa, synthetic construct
DSSSTY

SEQ ID NO: 1262 - protein, 7 aa, synthetic construct
IFSNMDM

SEQ ID NO: 1263 - protein, 15 aa, synthetic construct
AEIPRDSGGGADGLT

SEQ ID NO: 1264 - protein, 114 aa, synthetic construct
EDVEQSLFLSVREGDSSVINCTYTDSSSTYLYWYKQEPGAGLQLLTYIFSNMDMKQDQRLTVLLNKKDKHLSLRIADTQTGDSAIYFCAEIPRDSGGGADGLTFGKGTHLIIQP

SEQ ID NO: 1265 - protein, 115 aa, synthetic construct
GEDVEQSLFLSVREGDSSVINCTYTDSSSTYLYWYKQEPGAGLQLLTYIFSNMDMKQDQRLTVLLNKKDKHLSLRIADTQTGDSAIYFCAEIPRDSGGGADGLTFGKGTHLIIQP

SEQ ID NO: 1266 - protein, 136 aa, synthetic construct
  VARIANT 2: note = X can be any Amino Acid
MXTFAGFSFLFLWLQLDCMSRGEDVEQSLFLSVREGDSSVINCTYTDSSSTYLYWYKQEPGAGLQLLTYIFSNMDMKQDQRLTVLLNKKDKHLSLRIADTQTGDSAIYFCAEIPRDSGGGADGLTFGKGTHLIIQP

SEQ ID NO: 1267 - protein, 136 aa, synthetic construct; identical to SEQ ID NO: 1266
  VARIANT 2: note = X can be any Amino Acid

SEQ ID NO: 1268 - protein, 273 aa, synthetic construct
MKTFAGFSFLFLWLQLDCMSRGEDVEQSLFLSVREGDSSVINCTYTDSSSTYLYWYKQEPGAGLQLLTYIFSNMDMKQDQRLTVLLNKKDKHLSLRIADTQTGDSAIYFCAEIPRDSGGGADGLTFGKGTHLIIQPNIQNPEPAVYQLKDPRSQDSTLCLFTDFDSQINVPKTMESGTFITDKCVLDMKAMDSKSNGAIAWSNQTSFTCQDIFKETNATYPSSDVPCDATLTEKSFETDMNLNFQNLLVIVLRILLLKVAGFNLLMTLRLWSS

SEQ ID NO: 1269 - protein, 273 aa, synthetic construct
MATFAGFSFLFLWLQLDCMSRGEDVEQSLFLSVREGDSSVINCTYTDSSSTYLYWYKQEPGAGLQLLTYIFSNMDMKQDQRLTVLLNKKDKHLSLRIADTQTGDSAIYFCAEIPRDSGGGADGLTFGKGTHLIIQPNIQNPEPAVYQLKDPRSQDSTLCLFTDFDSQINVPKTMESGTFITDKCVLDMKAMDSKSNGAIAWSNQTSFTCQDIFKETNATYPSSDVPCDATLTEKSFETDMNLNFQNLLVIVLRILLLKVAGFNLLMTLRLWSS

SEQ ID NO: 1270 - protein, 273 aa, synthetic construct
MHTFAGFSFLFLWLQLDCMSRGEDVEQSLFLSVREGDSSVINCTYTDSSSTYLYWYKQEPGAGLQLLTYIFSNMDMKQDQRLTVLLNKKDKHLSLRIADTQTGDSAIYFCAEIPRDSGGGADGLTFGKGTHLIIQPNIQNPEPAVYQLKDPRSQDSTLCLFTDFDSQINVPKTMESGTFITDKCVLDMKAMDSKSNGAIAWSNQTSFTCQDIFKETNATYPSSDVPCDATLTEKSFETDMNLNFQNLLVIVLRILLLKVAGFNLLMTLRLWSS

SEQ ID NO: 1271 - protein, 6 aa, synthetic construct
DSSSTY

SEQ ID NO: 1272 - protein, 7 aa, synthetic construct
IFSNMDM

SEQ ID NO: 1273 - protein, 15 aa, synthetic construct
AEIPRDSGGGADGLT

SEQ ID NO: 1274 - protein, 114 aa, synthetic construct; identical to SEQ ID NO: 1264

SEQ ID NO: 1275 - protein, 115 aa, synthetic construct; identical to SEQ ID NO: 1265

SEQ ID NO: 1276 - protein, 136 aa, synthetic construct; identical to SEQ ID NO: 1266
  VARIANT 2: note = X can be any Amino Acid

SEQ ID NO: 1277 - protein, 136 aa, synthetic construct; identical to SEQ ID NO: 1266
  VARIANT 2: note = X can be any Amino Acid

SEQ ID NO: 1278 - protein, 273 aa, synthetic construct; identical to SEQ ID NO: 1268

SEQ ID NO: 1279 - protein, 273 aa, synthetic construct; identical to SEQ ID NO: 1269

SEQ ID NO: 1280 - protein, 273 aa, synthetic construct; identical to SEQ ID NO: 1270

SEQ ID NO: 1281 - protein, 6 aa, synthetic construct
NSASDY

SEQ ID NO: 1282 - protein, 7 aa, synthetic construct
IRSNMDK

SEQ ID NO: 1283 - protein, 14 aa, synthetic construct
AEPVGGLNSGYALN

SEQ ID NO: 1284 - protein, 114 aa, synthetic construct
ESVGLHLPTLSVQEGDNSIINCAYSNSASDYFIWYKQESGKGPQFIIDIRSNMDKRQGQRVTVLLNKTVKHLSLQIAATQPGDSAVYFCAEPVGGLNSGYALNFGKGTSLLVTP

SEQ ID NO: 1285 - protein, 115 aa, synthetic construct
GESVGLHLPTLSVQEGDNSIINCAYSNSASDYFIWYKQESGKGPQFIIDIRSNMDKRQGQRVTVLLNKTVKHLSLQIAATQPGDSAVYFCAEPVGGLNSGYALNFGKGTSLLVTP

SEQ ID NO: 1286 - protein, 135 aa, synthetic construct
  VARIANT 2: note = X can be any Amino Acid
MXGIRALFMYLWLQLDWVSRGESVGLHLPTLSVQEGDNSIINCAYSNSASDYFIWYKQESGKGPQFIIDIRSNMDKRQGQRVTVLLNKTVKHLSLQIAATQPGDSAVYFCAEPVGGLNSGYALNFGKGTSLLVTP

SEQ ID NO: 1287 - protein, 135 aa, synthetic construct; identical to SEQ ID NO: 1286
  VARIANT 2: note = X can be any Amino Acid

SEQ ID NO: 1288 - protein, 272 aa, synthetic construct
MAGIRALFMYLWLQLDWVSRGESVGLHLPTLSVQEGDNSIINCAYSNSASDYFIWYKQESGKGPQFIIDIRSNMDKRQGQRVTVLLNKTVKHLSLQIAATQPGDSAVYFCAEPVGGLNSGYALNFGKGTSLLVTPNIQNPEPAVYQLKDPRSQDSTLCLFTDFDSQINVPKTMESGTFITDKCVLDMKAMDSKSNGAIAWSNQTSFTCQDIFKETNATYPSSDVPCDATLTEKSFETDMNLNFQNLLVIVLRILLLKVAGFNLLMTLRLWSS

SEQ ID NO: 1289 - protein, 272 aa, synthetic construct; identical to SEQ ID NO: 1288

SEQ ID NO: 1290 - protein, 272 aa, synthetic construct
MHGIRALFMYLWLQLDWVSRGESVGLHLPTLSVQEGDNSIINCAYSNSASDYFIWYKQESGKGPQFIIDIRSNMDKRQGQRVTVLLNKTVKHLSLQIAATQPGDSAVYFCAEPVGGLNSGYALNFGKGTSLLVTPNIQNPEPAVYQLKDPRSQDSTLCLFTDFDSQINVPKTMESGTFITDKCVLDMKAMDSKSNGAIAWSNQTSFTCQDIFKETNATYPSSDVPCDATLTEKSFETDMNLNFQNLLVIVLRILLLKVAGFNLLMTLRLWSS

SEQ ID NO: 1291 - protein, 6 aa, synthetic construct
VSGLRG

SEQ ID NO: 1292 - protein, 7 aa, synthetic construct
LYSAGEE

SEQ ID NO: 1293 - protein, 14 aa, synthetic construct
AVTAHRGSTLGRLY

SEQ ID NO: 1294 - protein, 113 aa, synthetic construct
EDQVTQSPEALRLQEGESSSLNCSYTVSGLRGLFWYRQDPGKGPEFLFTLYSAGEEKEKERLKATLTKKESFLHITAPKPEDSATYLCAVTAHRGSTLGRLYFGRGTQLTVWP

SEQ ID NO: 1295 - protein, 113 aa, synthetic construct; identical to SEQ ID NO: 1294

SEQ ID NO: 1296 - protein, 134 aa, synthetic construct
  VARIANT 2: note = X can be any Amino Acid
MXKMLECAFIVLWLQLGWLSGEDQVTQSPEALRLQEGESSSLNCSYTVSGLRGLFWYRQDPGKGPEFLFTLYSAGEEKEKERLKATLTKKESFLHITAPKPEDSATYLCAVTAHRGSTLGRLYFGRGTQLTVWP

SEQ ID NO: 1297 - protein, 134 aa, synthetic construct; identical to SEQ ID NO: 1296
  VARIANT 2: note = X can be any Amino Acid

SEQ ID NO: 1298 - protein, 271 aa, synthetic construct
MEKMLECAFIVLWLQLGWLSGEDQVTQSPEALRLQEGESSSLNCSYTVSGLRGLFWYRQDPGKGPEFLFTLYSAGEEKEKERLKATLTKKESFLHITAPKPEDSATYLCAVTAHRGSTLGRLYFGRGTQLTVWPNIQNPEPAVYQLKDPRSQDSTLCLFTDFDSQINVPKTMESGTFITDKCVLDMKAMDSKSNGAIAWSNQTSFTCQDIFKETNATYPSSDVPCDATLTEKSFETDMNLNFQNLLVIVLRILLLKVAGFNLLMTLRLWSS

SEQ ID NO: 1299 - protein, 271 aa, synthetic construct
MAKMLECAFIVLWLQLGWLSGEDQVTQSPEALRLQEGESSSLNCSYTVSGLRGLFWYRQDPGKGPEFLFTLYSAGEEKEKERLKATLTKKESFLHITAPKPEDSATYLCAVTAHRGSTLGRLYFGRGTQLTVWPNIQNPEPAVYQLKDPRSQDSTLCLFTDFDSQINVPKTMESGTFITDKCVLDMKAMDSKSNGAIAWSNQTSFTCQDIFKETNATYPSSDVPCDATLTEKSFETDMNLNFQNLLVIVLRILLLKVAGFNLLMTLRLWSS

SEQ ID NO: 1300 - protein, 271 aa, synthetic construct
MHKMLECAFIVLWLQLGWLSGEDQVTQSPEALRLQEGESSSLNCSYTVSGLRGLFWYRQDPGKGPEFLFTLYSAGEEKEKERLKATLTKKESFLHITAPKPEDSATYLCAVTAHRGSTLGRLYFGRGTQLTVWPNIQNPEPAVYQLKDPRSQDSTLCLFTDFDSQINVPKTMESGTFITDKCVLDMKAMDSKSNGAIAWSNQTSFTCQDIFKETNATYPSSDVPCDATLTEKSFETDMNLNFQNLLVIVLRILLLKVAGFNLLMTLRLWSS

SEQ ID NO: 1301 - protein, 6 aa, synthetic construct
SSNFYA

SEQ ID NO: 1302 - protein, 7 aa, synthetic construct
MTLNGDE

SEQ ID NO: 1303 - protein, 11 aa, synthetic construct
ASVGGGADGLT

SEQ ID NO: 1304 - protein, 112 aa, synthetic construct
ILNVEQSPQSLHVQEGDSTNFTCSFPSSNFYALHWYRWETAKSPEALFVMTLNGDEKKKGRISATLNTKEGYSYLYIKGSQPEDSATYLCASVGGGADGLTFGKGTHLIIQP

SEQ ID NO: 1305 - protein, 112 aa, synthetic construct; identical to SEQ ID NO: 1304

SEQ ID NO: 1306 - protein, 134 aa, synthetic construct
  VARIANT 2: note = X can be any Amino Acid
MXKNPLAAPLLILWFHLDCVSSILNVEQSPQSLHVQEGDSTNFTCSFPSSNFYALHWYRWETAKSPEALFVMTLNGDEKKKGRISATLNTKEGYSYLYIKGSQPEDSATYLCASVGGGADGLTFGKGTHLIIQP

SEQ ID NO: 1307 - protein, 134 aa, synthetic construct; identical to SEQ ID NO: 1306
  VARIANT 2: note = X can be any Amino Acid

SEQ ID NO: 1308 - protein, 271 aa, synthetic construct
MEKNPLAAPLLILWFHLDCVSSILNVEQSPQSLHVQEGDSTNFTCSFPSSNFYALHWYRWETAKSPEALFVMTLNGDEKKKGRISATLNTKEGYSYLYIKGSQPEDSATYLCASVGGGADGLTFGKGTHLIIQPNIQNPEPAVYQLKDPRSQDSTLCLFTDFDSQINVPKTMESGTFITDKCVLDMKAMDSKSNGAIAWSNQTSFTCQDIFKETNATYPSSDVPCDATLTEKSFETDMNLNFQNLLVIVLRILLLKVAGFNLLMTLRLWSS

SEQ ID NO: 1309 - protein, 271 aa, synthetic construct
MAKNPLAAPLLILWFHLDCVSSILNVEQSPQSLHVQEGDSTNFTCSFPSSNFYALHWYRWETAKSPEALFVMTLNGDEKKKGRISATLNTKEGYSYLYIKGSQPEDSATYLCASVGGGADGLTFGKGTHLIIQPNIQNPEPAVYQLKDPRSQDSTLCLFTDFDSQINVPKTMESGTFITDKCVLDMKAMDSKSNGAIAWSNQTSFTCQDIFKETNATYPSSDVPCDATLTEKSFETDMNLNFQNLLVIVLRILLLKVAGFNLLMTLRLWSS

SEQ ID NO: 1310 - protein, 271 aa, synthetic construct
MHKNPLAAPLLILWFHLDCVSSILNVEQSPQSLHVQEGDSTNFTCSFPSSNFYALHWYRWETAKSPEALFVMTLNGDEKKKGRISATLNTKEGYSYLYIKGSQPEDSATYLCASVGGGADGLTFGKGTHLIIQPNIQNPEPAVYQLKDPRSQDSTLCLFTDFDSQINVPKTMESGTFITDKCVLDMKAMDSKSNGAIAWSNQTSFTCQDIFKETNATYPSSDVPCDATLTEKSFETDMNLNFQNLLVIVLRILLLKVAGFNLLMTLRLWSS

SEQ ID NO: 1311 - protein, 6 aa, synthetic construct
NSMFDY

SEQ ID NO: 1312 - protein, 7 aa, synthetic construct
ISSIKDK

SEQ ID NO: 1313 - protein, 9 aa, synthetic construct
AANTGNQFY

SEQ ID NO: 1314 - protein, 115 aa, synthetic construct
QQKNDDQQVKQNSPSLSVQEGRISILNCDYTNSMFDYFLWYKKYPAEGPTFLISISSIKDKNEDGRFTVFLNKSAKHLSLHIVPSQPGDSAVYFCAANTGNQFYFGTGTSLTVIP

SEQ ID NO: 1315 - protein, 110 aa, synthetic construct
DQQVKQNSPSLSVQEGRISILNCDYTNSMFDYFLWYKKYPAEGPTFLISISSIKDKNEDGRFTVFLNKSAKHLSLHIVPSQPGDSAVYFCAANTGNQFYFGTGTSLTVIP

SEQ ID NO: 1316 - protein, 136 aa, synthetic construct
  VARIANT 2: note = X can be any Amino Acid
MXMLLGASVLILWLQPDWVNSQQKNDDQQVKQNSPSLSVQEGRISILNCDYTNSMFDYFLWYKKYPAEGPTFLISISSIKDKNEDGRFTVFLNKSAKHLSLHIVPSQPGDSAVYFCAANTGNQFYFGTGTSLTVIP

SEQ ID NO: 1317 - protein, 136 aa, synthetic construct; identical to SEQ ID NO: 1316
  VARIANT 2: note = X can be any Amino Acid

SEQ ID NO: 1318 - protein, 273 aa, synthetic construct
MAMLLGASVLILWLQPDWVNSQQKNDDQQVKQNSPSLSVQEGRISILNCDYTNSMFDYFLWYKKYPAEGPTFLISISSIKDKNEDGRFTVFLNKSAKHLSLHIVPSQPGDSAVYFCAANTGNQFYFGTGTSLTVIPNIQNPEPAVYQLKDPRSQDSTLCLFTDFDSQINVPKTMESGTFITDKCVLDMKAMDSKSNGAIAWSNQTSFTCQDIFKETNATYPSSDVPCDATLTEKSFETDMNLNFQNLLVIVLRILLLKVAGFNLLMTLRLWSS

SEQ ID NO: 1319 - protein, 273 aa, synthetic construct; identical to SEQ ID NO: 1318

SEQ ID NO: 1320 - protein, 273 aa, synthetic construct
MHMLLGASVLILWLQPDWVNSQQKNDDQQVKQNSPSLSVQEGRISILNCDYTNSMFDYFLWYKKYPAEGPTFLISISSIKDKNEDGRFTVFLNKSAKHLSLHIVPSQPGDSAVYFCAANTGNQFYFGTGTSLTVIPNIQNPEPAVYQLKDPRSQDSTLCLFTDFDSQINVPKTMESGTFITDKCVLDMKAMDSKSNGAIAWSNQTSFTCQDIFKETNATYPSSDVPCDATLTEKSFETDMNLNFQNLLVIVLRILLLKVAGFNLLMTLRLWSS

SEQ ID NO: 1321 - protein, 6 aa, synthetic construct
TSGFYG

SEQ ID NO: 1322 - protein, 6 aa, synthetic construct
NALDGL

SEQ ID NO: 1323 - protein, 9 aa, synthetic construct
AFAYGQNFV

SEQ ID NO: 1324 - protein, 107 aa, synthetic construct
QSLEQPSEVTAVEGAIVQINCTYQTSGFYGLSWYQQHDGGAPTFLSYNALDGLEETGRFSSFLSRSDSYGYLLLQELQMKDSASYFCAFAYGQNFVFGPGTRLSVLP

SEQ ID NO: 1325 - protein, 108 aa, synthetic construct
GQSLEQPSEVTAVEGAIVQINCTYQTSGFYGLSWYQQHDGGAPTFLSYNALDGLEETGRFSSFLSRSDSYGYLLLQELQMKDSASYFCAFAYGQNFVFGPGTRLSVLP

SEQ ID NO: 1326 - protein, 125 aa, synthetic construct
  VARIANT 2: note = X can be any Amino Acid
MXGAFLLYVSMKMGGTAGQSLEQPSEVTAVEGAIVQINCTYQTSGFYGLSWYQQHDGGAPTFLSYNALDGLEETGRFSSFLSRSDSYGYLLLQELQMKDSASYFCAFAYGQNFVFGPGTRLSVLP

SEQ ID NO: 1327 - protein, 125 aa, synthetic construct; identical to SEQ ID NO: 1326
  VARIANT 2: note = X can be any Amino Acid

SEQ ID NO: 1328 - protein, 262 aa, synthetic construct
MWGAFLLYVSMKMGGTAGQSLEQPSEVTAVEGAIVQINCTYQTSGFYGLSWYQQHDGGAPTFLSYNALDGLEETGRFSSFLSRSDSYGYLLLQELQMKDSASYFCAFAYGQNFVFGPGTRLSVLPNIQNPEPAVYQLKDPRSQDSTLCLFTDFDSQINVPKTMESGTFITDKCVLDMKAMDSKSNGAIAWSNQTSFTCQDIFKETNATYPSSDVPCDATLTEKSFETDMNLNFQNLLVIVLRILLLKVAGFNLLMTLRLWSS

SEQ ID NO: 1329 - protein, 262 aa, synthetic construct
MAGAFLLYVSMKMGGTAGQSLEQPSEVTAVEGAIVQINCTYQTSGFYGLSWYQQHDGGAPTFLSYNALDGLEETGRFSSFLSRSDSYGYLLLQELQMKDSASYFCAFAYGQNFVFGPGTRLSVLPNIQNPEPAVYQLKDPRSQDSTLCLFTDFDSQINVPKTMESGTFITDKCVLDMKAMDSKSNGAIAWSNQTSFTCQDIFKETNATYPSSDVPCDATLTEKSFETDMNLNFQNLLVIVLRILLLKVAGFNLLMTLRLWSS

SEQ ID NO: 1330 - protein, 262 aa, synthetic construct
MHGAFLLYVSMKMGGTAGQSLEQPSEVTAVEGAIVQINCTYQTSGFYGLSWYQQHDGGAPTFLSYNALDGLEETGRFSSFLSRSDSYGYLLLQELQMKDSASYFCAFAYGQNFVFGPGTRLSVLPNIQNPEPAVYQLKDPRSQDSTLCLFTDFDSQINVPKTMESGTFITDKCVLDMKAMDSKSNGAIAWSNQTSFTCQDIFKETNATYPSSDVPCDATLTEKSFETDMNLNFQNLLVIVLRILLLKVAGFNLLMTLRLWSS

SEQ ID NO: 1331 - protein, 5 aa, synthetic construct
TSINN

SEQ ID NO: 1332 - protein, 7 aa, synthetic construct
IRSNERE

SEQ ID NO: 1333 - protein, 10 aa, synthetic construct
ATDAWNNDMR

SEQ ID NO: 1334 - protein, 109 aa, synthetic construct
QQGEEDPQALSIQEGENATMNCSYKTSINNLQWYRQNSGRGLVHLILIRSNEREKHSGRLRVTLDTSKKSSSLLITASRAADTASYFCATDAWNNDMRFGAGTRLTVKP

SEQ ID NO: 1335 - protein, 110 aa, synthetic construct
SQQGEEDPQALSIQEGENATMNCSYKTSINNLQWYRQNSGRGLVHLILIRSNEREKHSGRLRVTLDTSKKSSSLLITASRAADTASYFCATDAWNNDMRFGAGTRLTVKP

SEQ ID NO: 1336 - protein, 130 aa, synthetic construct
  VARIANT 2: note = X can be any Amino Acid
MXTLLGVSLVILWLQLARVNSQQGEEDPQALSIQEGENATMNCSYKTSINNLQWYRQNSGRGLVHLILIRSNEREKHSGRLRVTLDTSKKSSSLLITASRAADTASYFCATDAWNNDMRFGAGTRLTVKP

SEQ ID NO: 1337 - protein, 130 aa, synthetic construct; identical to SEQ ID NO: 1336
  VARIANT 2: note = X can be any Amino Acid

SEQ ID NO: 1338 - protein, 267 aa, synthetic construct
METLLGVSLVILWLQLARVNSQQGEEDPQALSIQEGENATMNCSYKTSINNLQWYRQNSGRGLVHLILIRSNEREKHSGRLRVTLDTSKKSSSLLITASRAADTASYFCATDAWNNDMRFGAGTRLTVKPNIQNPEPAVYQLKDPRSQDSTLCLFTDFDSQINVPKTMESGTFITDKCVLDMKAMDSKSNGAIAWSNQTSFTCQDIFKETNATYPSSDVPCDATLTEKSFETDMNLNFQNLLVIVLRILLLKVAGFNLLMTLRLWSS

SEQ ID NO: 1339 - protein, 267 aa, synthetic construct
MATLLGVSLVILWLQLARVNSQQGEEDPQALSIQEGENATMNCSYKTSINNLQWYRQNSGRGLVHLILIRSNEREKHSGRLRVTLDTSKKSSSLLITASRAADTASYFCATDAWNNDMRFGAGTRLTVKPNIQNPEPAVYQLKDPRSQDSTLCLFTDFDSQINVPKTMESGTFITDKCVLDMKAMDSKSNGAIAWSNQTSFTCQDIFKETNATYPSSDVPCDATLTEKSFETDMNLNFQNLLVIVLRILLLKVAGFNLLMTLRLWSS

SEQ ID NO: 1340 - protein, 267 aa, synthetic construct
MHTLLGVSLVILWLQLARVNSQQGEEDPQALSIQEGENATMNCSYKTSINNLQWYRQNSGRGLVHLILIRSNEREKHSGRLRVTLDTSKKSSSLLITASRAADTASYFCATDAWNNDMRFGAGTRLTVKPNIQNPEPAVYQLKDPRSQDSTLCLFTDFDSQINVPKTMESGTFITDKCVLDMKAMDSKSNGAIAWSNQTSFTCQDIFKETNATYPSSDVPCDATLTEKSFETDMNLNFQNLLVIVLRILLLKVAGFNLLMTLRLWSS

SEQ ID NO: 1341 - protein, 6 aa, synthetic construct
VSPFSN

SEQ ID NO: 1342 - protein, 7 aa, synthetic construct
MTFSENT

SEQ ID NO: 1343 - protein, 8 aa, synthetic construct
VVSSYKII

SEQ ID NO: 1344 - protein, 109 aa, synthetic construct
KNQVEQSPQSLIILEGKNCTLQCNYTVSPFSNLRWYKQDTGRGPVSLTIMTFSENTKSNGRYTATLDADTKQSSLHITASQLSDSASYICVVSSYKIIFGTGTRLHVFP

SEQ ID NO: 1345 - protein, 109 aa, synthetic construct; identical to SEQ ID NO: 1344

SEQ ID NO: 1346 - protein, 130 aa, synthetic construct
  VARIANT 2: note = X can be any Amino Acid
MXKHLTTFLVILWLYFYRGNGKNQVEQSPQSLIILEGKNCTLQCNYTVSPFSNLRWYKQDTGRGPVSLTIMTFSENTKSNGRYTATLDADTKQSSLHITASQLSDSASYICVVSSYKIIFGTGTRLHVFP

SEQ ID NO: 1347 - protein, 130 aa, synthetic construct; identical to SEQ ID NO: 1346
  VARIANT 2: note = X can be any Amino Acid

SEQ ID NO: 1348 - protein, 267 aa, synthetic construct
MKKHLTTFLVILWLYFYRGNGKNQVEQSPQSLIILEGKNCTLQCNYTVSPFSNLRWYKQDTGRGPVSLTIMTFSENTKSNGRYTATLDADTKQSSLHITASQLSDSASYICVVSSYKIIFGTGTRLHVFPNIQNPEPAVYQLKDPRSQDSTLCLFTDFDSQINVPKTMESGTFITDKCVLDMKAMDSKSNGAIAWSNQTSFTCQDIFKETNATYPSSDVPCDATLTEKSFETDMNLNFQNLLVIVLRILLLKVAGFNLLMTLRLWSS

SEQ ID NO: 1349 - protein, 267 aa, synthetic construct
MAKHLTTFLVILWLYFYRGNGKNQVEQSPQSLIILEGKNCTLQCNYTVSPFSNLRWYKQDTGRGPVSLTIMTFSENTKSNGRYTATLDADTKQSSLHITASQLSDSASYICVVSSYKIIFGTGTRLHVFPNIQNPEPAVYQLKDPRSQDSTLCLFTDFDSQINVPKTMESGTFITDKCVLDMKAMDSKSNGAIAWSNQTSFTCQDIFKETNATYPSSDVPCDATLTEKSFETDMNLNFQNLLVIVLRILLLKVAGFNLLMTLRLWSS

SEQ ID NO: 1350 - protein, 267 aa, synthetic construct
MHKHLTTFLVILWLYFYRGNGKNQVEQSPQSLIILEGKNCTLQCNYTVSPFSNLRWYKQDTGRGPVSLTIMTFSENTKSNGRYTATLDADTKQSSLHITASQLSDSASYICVVSSYKIIFGTGTRLHVFPNIQNPEPAVYQLKDPRSQDSTLCLFTDFDSQINVPKTMESGTFITDKCVLDMKAMDSKSNGAIAWSNQTSFTCQDIFKETNATYPSSDVPCDATLTEKSFETDMNLNFQNLLVIVLRILLLKVAGFNLLMTLRLWSS

SEQ ID NO: 1351 - protein, 6 aa, synthetic construct
VSPFSN

SEQ ID NO: 1352 - protein, 7 aa, synthetic construct
MTFSENT

SEQ ID NO: 1353 - protein, 8 aa, synthetic construct
VVSSYKLI

SEQ ID NO: 1354 - protein, 109 aa, synthetic construct
KNQVEQSPQSLIILEGKNCTLQCNYTVSPFSNLRWYKQDTGRGPVSLTIMTFSENTKSNGRYTATLDADTKQSSLHITASQLSDSASYICVVSSYKLIFGTGTRLQVFP

SEQ ID NO: 1355 - protein, 109 aa, synthetic construct; identical to SEQ ID NO: 1354

SEQ ID NO: 1356 - protein, 130 aa, synthetic construct
  VARIANT 2: note = X can be any Amino Acid
MXKHLTTFLVILWLYFYRGNGKNQVEQSPQSLIILEGKNCTLQCNYTVSPFSNLRWYKQDTGRGPVSLTIMTFSENTKSNGRYTATLDADTKQSSLHITASQLSDSASYICVVSSYKLIFGTGTRLQVFP

SEQ ID NO: 1357 - protein, 130 aa, synthetic construct; identical to SEQ ID NO: 1356
  VARIANT 2: note = X can be any Amino Acid

SEQ ID NO: 1358 - protein, 267 aa, synthetic construct
MKKHLTTFLVILWLYFYRGNGKNQVEQSPQSLIILEGKNCTLQCNYTVSPFSNLRWYKQDTGRGPVSLTIMTFSENTKSNGRYTATLDADTKQSSLHITASQLSDSASYICVVSSYKLIFGTGTRLQVFPNIQNPEPAVYQLKDPRSQDSTLCLFTDFDSQINVPKTMESGTFITDKCVLDMKAMDSKSNGAIAWSNQTSFTCQDIFKETNATYPSSDVPCDATLTEKSFETDMNLNFQNLLVIVLRILLLKVAGFNLLMTLRLWSS

SEQ ID NO: 1359 - protein, 267 aa, synthetic construct
MAKHLTTFLVILWLYFYRGNGKNQVEQSPQSLIILEGKNCTLQCNYTVSPFSNLRWYKQDTGRGPVSLTIMTFSENTKSNGRYTATLDADTKQSSLHITASQLSDSASYICVVSSYKLIFGTGTRLQVFPNIQNPEPAVYQLKDPRSQDSTLCLFTDFDSQINVPKTMESGTFITDKCVLDMKAMDSKSNGAIAWSNQTSFTCQDIFKETNATYPSSDVPCDATLTEKSFETDMNLNFQNLLVIVLRILLLKVAGFNLLMTLRLWSS

SEQ ID NO: 1360 - protein, 267 aa, synthetic construct
MHKHLTTFLVILWLYFYRGNGKNQVEQSPQSLIILEGKNCTLQCNYTVSPFSNLRWYKQDTGRGPVSLTIMTFSENTKSNGRYTATLDADTKQSSLHITASQLSDSASYICVVSSYKLIFGTGTRLQVFPNIQNPEPAVYQLKDPRSQDSTLCLFTDFDSQINVPKTMESGTFITDKCVLDMKAMDSKSNGAIAWSNQTSFTCQDIFKETNATYPSSDVPCDATLTEKSFETDMNLNFQNLLVIVLRILLLKVAGFNLLMTLRLWSS

SEQ ID NO: 1361 - protein, 6 aa, synthetic construct
SSVSVY

SEQ ID NO: 1362 - protein, 8 aa, synthetic construct
YLSGSTLV

SEQ ID NO: 1363 - protein, 12 aa, synthetic construct
AVSKGTGAQKLV

SEQ ID NO: 1364 - protein, 113 aa, synthetic construct
QSVTQLDSQVPVFEEAPVELRCNYSSSVSVYLFWYVQYPNQGLQLLLKYLSGSTLVESINGFEAEFNKSQTSFHLRKPSVHISDTAEYFCAVSKGTGAQKLVFGQGTRLTINP

SEQ ID NO: 1365 - protein, 114 aa, synthetic construct
AQSVTQLDSQVPVFEEAPVELRCNYSSSVSVYLFWYVQYPNQGLQLLLKYLSGSTLVESINGFEAEFNKSQTSFHLRKPSVHISDTAEYFCAVSKGTGAQKLVFGQGTRLTINP

SEQ ID NO: 1366 - protein, 133 aa, synthetic construct
  VARIANT 2: note = X can be any Amino Acid
MXLLLVPAFQVIFTLGGTRAQSVTQLDSQVPVFEEAPVELRCNYSSSVSVYLFWYVQYPNQGLQLLLKYLSGSTLVESINGFEAEFNKSQTSFHLRKPSVHISDTAEYFCAVSKGTGAQKLVFGQGTRLTINP

SEQ ID NO: 1367 - protein, 133 aa, synthetic construct; identical to SEQ ID NO: 1366
  VARIANT 2: note = X can be any Amino Acid

SEQ ID NO: 1368 - protein, 270 aa, synthetic construct
MLLLLVPAFQVIFTLGGTRAQSVTQLDSQVPVFEEAPVELRCNYSSSVSVYLFWYVQYPNQGLQLLLKYLSGSTLVESINGFEAEFNKSQTSFHLRKPSVHISDTAEYFCAVSKGTGAQKLVFGQGTRLTINPNIQNPEPAVYQLKDPRSQDSTLCLFTDFDSQINVPKTMESGTFITDKCVLDMKAMDSKSNGAIAWSNQTSFTCQDIFKETNATYPSSDVPCDATLTEKSFETDMNLNFQNLLVIVLRILLLKVAGFNLLMTLRLWSS

SEQ ID NO: 1369 - protein, 270 aa, synthetic construct
MALLLVPAFQVIFTLGGTRAQSVTQLDSQVPVFEEAPVELRCNYSSSVSVYLFWYVQYPNQGLQLLLKYLSGSTLVESINGFEAEFNKSQTSFHLRKPSVHISDTAEYFCAVSKGTGAQKLVFGQGTRLTINPNIQNPEPAVYQLKDPRSQDSTLCLFTDFDSQINVPKTMESGTFITDKCVLDMKAMDSKSNGAIAWSNQTSFTCQDIFKETNATYPSSDVPCDATLTEKSFETDMNLNFQNLLVIVLRILLLKVAGFNLLMTLRLWSS

SEQ ID NO: 1370 - protein, 270 aa, synthetic construct
MHLLLVPAFQVIFTLGGTRAQSVTQLDSQVPVFEEAPVELRCNYSSSVSVYLFWYVQYPNQGLQLLLKYLSGSTLVESINGFEAEFNKSQTSFHLRKPSVHISDTAEYFCAVSKGTGAQKLVFGQGTRLTINPNIQNPEPAVYQLKDPRSQDSTLCLFTDFDSQINVPKTMESGTFITDKCVLDMKAMDSKSNGAIAWSNQTSFTCQDIFKETNATYPSSDVPCDATLTEKSFETDMNLNFQNLLVIVLRILLLKVAGFNLLMTLRLWSS

SEQ ID NO: 1371 - protein, 7 aa, synthetic construct
TISGTDY

SEQ ID NO: 1372 - protein, 5 aa, synthetic construct
GLTSN

SEQ ID NO: 1373 - protein, 12 aa, synthetic construct
ILASGAGSYQLT

SEQ ID NO: 1374 - protein, 109 aa, synthetic construct
KTTQPNSMESNEEEPVHLPCNHSTISGTDYIHWYRQLPSQGPEYVIHGLTSNVNNRMASLAIAEDRKSSTLILHRATLRDAAVYYCILASGAGSYQLTFGKGTKLSVIP

SEQ ID NO: 1375 - protein, 111 aa, synthetic construct
DAKTTQPNSMESNEEEPVHLPCNHSTISGTDYIHWYRQLPSQGPEYVIHGLTSNVNNRMASLAIAEDRKSSTLILHRATLRDAAVYYCILASGAGSYQLTFGKGTKLSVIP

SEQ ID NO: 1376 - protein, 128 aa, synthetic construct
  VARIANT 2: note = X can be any Amino Acid
MXLVTSITVLLSLGIMGDAKTTQPNSMESNEEEPVHLPCNHSTISGTDYIHWYRQLPSQGPEYVIHGLTSNVNNRMASLAIAEDRKSSTLILHRATLRDAAVYYCILASGAGSYQLTFGKGTKLSVIP

SEQ ID NO: 1377 - protein, 128 aa, synthetic construct; identical to SEQ ID NO: 1376
  VARIANT 2: note = X can be any Amino Acid

SEQ ID NO: 1378 - protein, 265 aa, synthetic construct
MKLVTSITVLLSLGIMGDAKTTQPNSMESNEEEPVHLPCNHSTISGTDYIHWYRQLPSQGPEYVIHGLTSNVNNRMASLAIAEDRKSSTLILHRATLRDAAVYYCILASGAGSYQLTFGKGTKLSVIPNIQNPEPAVYQLKDPRSQDSTLCLFTDFDSQINVPKTMESGTFITDKCVLDMKAMDSKSNGAIAWSNQTSFTCQDIFKETNATYPSSDVPCDATLTEKSFETDMNLNFQNLLVIVLRILLLKVAGFNLLMTLRLWSS

SEQ ID NO: 1379 - protein, 265 aa, synthetic construct
MALVTSITVLLSLGIMGDAKTTQPNSMESNEEEPVHLPCNHSTISGTDYIHWYRQLPSQGPEYVIHGLTSNVNNRMASLAIAEDRKSSTLILHRATLRDAAVYYCILASGAGSYQLTFGKGTKLSVIPNIQNPEPAVYQLKDPRSQDSTLCLFTDFDSQINVPKTMESGTFITDKCVLDMKAMDSKSNGAIAWSNQTSFTCQDIFKETNATYPSSDVPCDATLTEKSFETDMNLNFQNLLVIVLRILLLKVAGFNLLMTLRLWSS

SEQ ID NO: 1380 - protein, 265 aa, synthetic construct
MHLVTSITVLLSLGIMGDAKTTQPNSMESNEEEPVHLPCNHSTISGTDYIHWYRQLPSQGPEYVIHGLTSNVNNRMASLAIAEDRKSSTLILHRATLRDAAVYYCILASGAGSYQLTFGKGTKLSVIPNIQNPEPAVYQLKDPRSQDSTLCLFTDFDSQINVPKTMESGTFITDKCVLDMKAMDSKSNGAIAWSNQTSFTCQDIFKETNATYPSSDVPCDATLTEKSFETDMNLNFQNLLVIVLRILLLKVAGFNLLMTLRLWSS

SEQ ID NO: 1381 - protein, 5 aa, synthetic construct
VGISA

SEQ ID NO: 1382 - protein, 5 aa, synthetic construct
LSSGK

SEQ ID NO: 1383 - protein, 11 aa, synthetic construct
AALSYNTDKLI

SEQ ID NO: 1384 - protein, 110 aa, synthetic construct
AKNEVEQSPQNLTAQEGEFITINCSYSVGISALHWLQQHPGGGIVSLFMLSSGKKKHGRLIATINIQEKHSSLHITASHPRDSAVYICAALSYNTDKLIFGTGTRLQVFP

SEQ ID NO: 1385 - protein, 109 aa, synthetic construct
KNEVEQSPQNLTAQEGEFITINCSYSVGISALHWLQQHPGGGIVSLFMLSSGKKKHGRLIATINIQEKHSSLHITASHPRDSAVYICAALSYNTDKLIFGTGTRLQVFP

SEQ ID NO: 1386 - protein, 131 aa, synthetic construct
  VARIANT 2: note = X can be any Amino Acid
MXKIRQFLLAILWLQLSCVSAAKNEVEQSPQNLTAQEGEFITINCSYSVGISALHWLQQHPGGGIVSLFMLSSGKKKHGRLIATINIQEKHSSLHITASHPRDSAVYICAALSYNTDKLIFGTGTRLQVFP

SEQ ID NO: 1387 - protein, 131 aa, synthetic construct; identical to SEQ ID NO: 1386
  VARIANT 2: note = X can be any Amino Acid

SEQ ID NO: 1388 - protein, 268 aa, synthetic construct
MKKIRQFLLAILWLQLSCVSAAKNEVEQSPQNLTAQEGEFITINCSYSVGISALHWLQQHPGGGIVSLFMLSSGKKKHGRLIATINIQEKHSSLHITASHPRDSAVYICAALSYNTDKLIFGTGTRLQVFPNIQNPEPAVYQLKDPRSQDSTLCLFTDFDSQINVPKTMESGTFITDKCVLDMKAMDSKSNGAIAWSNQTSFTCQDIFKETNATYPSSDVPCDATLTEKSFETDMNLNFQNLLVIVLRILLLKVAGFNLLMTLRLWSS

SEQ ID NO: 1389 - protein, 268 aa, synthetic construct
MAKIRQFLLAILWLQLSCVSAAKNEVEQSPQNLTAQEGEFITINCSYSVGISALHWLQQHPGGGIVSLFMLSSGKKKHGRLIATINIQEKHSSLHITASHPRDSAVYICAALSYNTDKLIFGTGTRLQVFPNIQNPEPAVYQLKDPRSQDSTLCLFTDFDSQINVPKTMESGTFITDKCVLDMKAMDSKSNGAIAWSNQTSFTCQDIFKETNATYPSSDVPCDATLTEKSFETDMNLNFQNLLVIVLRILLLKVAGFNLLMTLRLWSS

SEQ ID NO: 1390 - protein, 268 aa, synthetic construct
MHKIRQFLLAILWLQLSCVSAAKNEVEQSPQNLTAQEGEFITINCSYSVGISALHWLQQHPGGGIVSLFMLSSGKKKHGRLIATINIQEKHSSLHITASHPRDSAVYICAALSYNTDKLIFGTGTRLQVFPNIQNPEPAVYQLKDPRSQDSTLCLFTDFDSQINVPKTMESGTFITDKCVLDMKAMDSKSNGAIAWSNQTSFTCQDIFKETNATYPSSDVPCDATLTEKSFETDMNLNFQNLLVIVLRILLLKVAGFNLLMTLRLWSS

SEQ ID NO: 1391 - protein, 6 aa, synthetic construct
ATGYPS

SEQ ID NO: 1392 - protein, 7 aa, synthetic construct
ATKADDK

SEQ ID NO: 1393 - protein, 14 aa, synthetic construct
ALSHTGSSNTGKLI

SEQ ID NO: 1394 - protein, 114 aa, synthetic construct
NSVTQMEGPVTLSEEAFLTINCTYTATGYPSLFWYVQYPGEGLQLLLKATKADDKGSNKGFEATYRKETTSFHLEKGSVQVSDSAVYFCALSHTGSSNTGKLIFGQGTRLQVKP

SEQ ID NO: 1395 - protein, 115 aa, synthetic construct
GNSVTQMEGPVTLSEEAFLTINCTYTATGYPSLFWYVQYPGEGLQLLLKATKADDKGSNKGFEATYRKETTSFHLEKGSVQVSDSAVYFCALSHTGSSNTGKLIFGQGTRLQVKP

SEQ ID NO: 1396 - protein, 134 aa, synthetic construct
  VARIANT 2: note = X can be any Amino Acid
MXYSPGLVSLILLLLGRTRGNSVTQMEGPVTLSEEAFLTINCTYTATGYPSLFWYVQYPGEGLQLLLKATKADDKGSNKGFEATYRKETTSFHLEKGSVQVSDSAVYFCALSHTGSSNTGKLIFGQGTRLQVKP

SEQ ID NO: 1397 - protein, 134 aa, synthetic construct; identical to SEQ ID NO: 1396
  VARIANT 2: note = X can be any Amino Acid

SEQ ID NO: 1398 - protein, 271 aa, synthetic construct
MNYSPGLVSLILLLLGRTRGNSVTQMEGPVTLSEEAFLTINCTYTATGYPSLFWYVQYPGEGLQLLLKATKADDKGSNKGFEATYRKETTSFHLEKGSVQVSDSAVYFCALSHTGSSNTGKLIFGQGTRLQVKPNIQNPEPAVYQLKDPRSQDSTLCLFTDFDSQINVPKTMESGTFITDKCVLDMKAMDSKSNGAIAWSNQTSFTCQDIFKETNATYPSSDVPCDATLTEKSFETDMNLNFQNLLVIVLRILLLKVAGFNLLMTLRLWSS

SEQ ID NO: 1399 - protein, 271 aa, synthetic construct
MAYSPGLVSLILLLLGRTRGNSVTQMEGPVTLSEEAFLTINCTYTATGYPSLFWYVQYPGEGLQLLLKATKADDKGSNKGFEATYRKETTSFHLEKGSVQVSDSAVYFCALSHTGSSNTGKLIFGQGTRLQVKPNIQNPEPAVYQLKDPRSQDSTLCLFTDFDSQINVPKTMESGTFITDKCVLDMKAMDSKSNGAIAWSNQTSFTCQDIFKETNATYPSSDVPCDATLTEKSFETDMNLNFQNLLVIVLRILLLKVAGFNLLMTLRLWSS

SEQ ID NO: 1400 - protein, 271 aa, synthetic construct
MHYSPGLVSLILLLLGRTRGNSVTQMEGPVTLSEEAFLTINCTYTATGYPSLFWYVQYPGEGLQLLLKATKADDKGSNKGFEATYRKETTSFHLEKGSVQVSDSAVYFCALSHTGSSNTGKLIFGQGTRLQVKPNIQNPEPAVYQLKDPRSQDSTLCLFTDFDSQINVPKTMESGTFITDKCVLDMKAMDSKSNGAIAWSNQTSFTCQDIFKETNATYPSSDVPCDATLTEKSFETDMNLNFQNLLVIVLRILLLKVAGFNLLMTLRLWSS

SEQ ID NO: 1401 - protein, 6 aa, synthetic construct
ATGYPS

SEQ ID NO: 1402 - protein, 7 aa, synthetic construct
ATKADDK

SEQ ID NO: 1403 - protein, 14 aa, synthetic construct
ALSQTGSSKTGKLI

SEQ ID NO: 1404 - protein, 114 aa, synthetic construct
NSVTQMEGPVTLSEEAFLTINCTYTATGYPSLFWYVQYPGEGLQLLLKATKADDKGSNKGFEATYRKETTSFHLEKGSVQVSDSAVYFCALSQTGSSKTGKLIFGQGTRLQVKP

SEQ ID NO: 1405 - protein, 115 aa, synthetic construct
GNSVTQMEGPVTLSEEAFLTINCTYTATGYPSLFWYVQYPGEGLQLLLKATKADDKGSNKGFEATYRKETTSFHLEKGSVQVSDSAVYFCALSQTGSSKTGKLIFGQGTRLQVKP

SEQ ID NO: 1406 - protein, 134 aa, synthetic construct
  VARIANT 2: note = X can be any Amino Acid
MXYSPGLVSLILLLLGRTRGNSVTQMEGPVTLSEEAFLTINCTYTATGYPSLFWYVQYPGEGLQLLLKATKADDKGSNKGFEATYRKETTSFHLEKGSVQVSDSAVYFCALSQTGSSKTGKLIFGQGTRLQVKP

SEQ ID NO: 1407 - protein, 134 aa, synthetic construct; identical to SEQ ID NO: 1406
  VARIANT 2: note = X can be any Amino Acid

SEQ ID NO: 1408 - protein, 271 aa, synthetic construct
MNYSPGLVSLILLLLGRTRGNSVTQMEGPVTLSEEAFLTINCTYTATGYPSLFWYVQYPGEGLQLLLKATKADDKGSNKGFEATYRKETTSFHLEKGSVQVSDSAVYFCALSQTGSSKTGKLIFGQGTRLQVKPNIQNPEPAVYQLKDPRSQDSTLCLFTDFDSQINVPKTMESGTFITDKCVLDMKAMDSKSNGAIAWSNQTSFTCQDIFKETNATYPSSDVPCDATLTEKSFETDMNLNFQNLLVIVLRILLLKVAGFNLLMTLRLWSS

SEQ ID NO: 1409 - protein, 271 aa, synthetic construct
MAYSPGLVSLILLLLGRTRGNSVTQMEGPVTLSEEAFLTINCTYTATGYPSLFWYVQYPGEGLQLLLKATKADDKGSNKGFEATYRKETTSFHLEKGSVQVSDSAVYFCALSQTGSSKTGKLIFGQGTRLQVKPNIQNPEPAVYQLKDPRSQDSTLCLFTDFDSQINVPKTMESGTFITDKCVLDMKAMDSKSNGAIAWSNQTSFTCQDIFKETNATYPSSDVPCDATLTEKSFETDMNLNFQNLLVIVLRILLLKVAGFNLLMTLRLWSS

SEQ ID NO: 1410 - protein, 271 aa, synthetic construct
MHYSPGLVSLILLLLGRTRGNSVTQMEGPVTLSEEAFLTINCTYTATGYPSLFWYVQYPGEGLQLLLKATKADDKGSNKGFEATYRKETTSFHLEKGSVQVSDSAVYFCALSQTGSSKTGKLIFGQGTRLQVKPNIQNPEPAVYQLKDPRSQDSTLCLFTDFDSQINVPKTMESGTFITDKCVLDMKAMDSKSNGAIAWSNQTSFTCQDIFKETNATYPSSDVPCDATLTEKSFETDMNLNFQNLLVIVLRILLLKVAGFNLLMTLRLWSS

SEQ ID NO: 1411 - protein, 6 aa, synthetic construct
ATGYPS

SEQ ID NO: 1412 - protein, 7 aa, synthetic construct
ATKADDK

SEQ ID NO: 1413 - protein, 14 aa, synthetic construct
ALSQTGSSNTGKLI

SEQ ID NO: 1414 - protein, 114 aa, synthetic construct
NSVTQMEGPVTLSEEAFLTINCTYTATGYPSLFWYVQYPGEGLQLLLKATKADDKGSNKGFEATYRKETTSFHLEKGSVQVSDSAVYFCALSQTGSSNTGKLIFGQGTRLQVKP

SEQ ID NO: 1415 - protein, 115 aa, synthetic construct
GNSVTQMEGPVTLSEEAFLTINCTYTATGYPSLFWYVQYPGEGLQLLLKATKADDKGSNKGFEATYRKETTSFHLEKGSVQVSDSAVYFCALSQTGSSNTGKLIFGQGTRLQVKP

SEQ ID NO: 1416 - protein, 134 aa, synthetic construct
  VARIANT 2: note = X can be any Amino Acid
MXYSPGLVSLILLLLGRTRGNSVTQMEGPVTLSEEAFLTINCTYTATGYPSLFWYVQYPGEGLQLLLKATKADDKGSNKGFEATYRKETTSFHLEKGSVQVSDSAVYFCALSQTGSSNTGKLIFGQGTRLQVKP

SEQ ID NO: 1417 - protein, 134 aa, synthetic construct; identical to SEQ ID NO: 1416
  VARIANT 2: note = X can be any Amino Acid

SEQ ID NO: 1418 - protein, 271 aa, synthetic construct
MNYSPGLVSLILLLLGRTRGNSVTQMEGPVTLSEEAFLTINCTYTATGYPSLFWYVQYPGEGLQLLLKATKADDKGSNKGFEATYRKETTSFHLEKGSVQVSDSAVYFCALSQTGSSNTGKLIFGQGTRLQVKPNIQNPEPAVYQLKDPRSQDSTLCLFTDFDSQINVPKTMESGTFITDKCVLDMKAMDSKSNGAIAWSNQTSFTCQDIFKETNATYPSSDVPCDATLTEKSFETDMNLNFQNLLVIVLRILLLKVAGFNLLMTLRLWSS

SEQ ID NO: 1419 - protein, 271 aa, synthetic construct
MAYSPGLVSLILLLLGRTRGNSVTQMEGPVTLSEEAFLTINCTYTATGYPSLFWYVQYPGEGLQLLLKATKADDKGSNKGFEATYRKETTSFHLEKGSVQVSDSAVYFCALSQTGSSNTGKLIFGQGTRLQVKPNIQNPEPAVYQLKDPRSQDSTLCLFTDFDSQINVPKTMESGTFITDKCVLDMKAMDSKSNGAIAWSNQTSFTCQDIFKETNATYPSSDVPCDATLTEKSFETDMNLNFQNLLVIVLRILLLKVAGFNLLMTLRLWSS

SEQ ID NO: 1420 - protein, 271 aa, synthetic construct
MHYSPGLVSLILLLLGRTRGNSVTQMEGPVTLSEEAFLTINCTYTATGYPSLFWYVQYPGEGLQLLLKATKADDKGSNKGFEATYRKETTSFHLEKGSVQVSDSAVYFCALSQTGSSNTGKLIFGQGTRLQVKPNIQNPEPAVYQLKDPRSQDSTLCLFTDFDSQINVPKTMESGTFITDKCVLDMKAMDSKSNGAIAWSNQTSFTCQDIFKETNATYPSSDVPCDATLTEKSFETDMNLNFQNLLVIVLRILLLKVAGFNLLMTLRLWSS

SEQ ID NO: 1421 - protein, 6 aa, synthetic construct
ATGYPS

SEQ ID NO: 1422 - protein, 7 aa, synthetic construct
ATKADDK

SEQ ID NO: 1423 - protein, 14 aa, synthetic construct
ALSTTGSSNTGKLI

SEQ ID NO: 1424 - protein, 114 aa, synthetic construct
NSVTQMEGPVTLSEEAFLTINCTYTATGYPSLFWYVQYPGEGLQLLLKATKADDKGSNKGFEATYRKETTSFHLEKGSVQVSDSAVYFCALSTTGSSNTGKLIFGQGTTLQVKP

SEQ ID NO: 1425 - protein, 115 aa, synthetic construct
GNSVTQMEGPVTLSEEAFLTINCTYTATGYPSLFWYVQYPGEGLQLLLKATKADDKGSNKGFEATYRKETTSFHLEKGSVQVSDSAVYFCALSTTGSSNTGKLIFGQGTTLQVKP

SEQ ID NO: 1426 - protein, 134 aa, synthetic construct
  VARIANT 2: note = X can be any Amino Acid
MXYSPGLVSLILLLLGRTRGNSVTQMEGPVTLSEEAFLTINCTYTATGYPSLFWYVQYPGEGLQLLLKATKADDKGSNKGFEATYRKETTSFHLEKGSVQVSDSAVYFCALSTTGSSNTGKLIFGQGTTLQVKP

SEQ ID NO: 1427 - protein, 134 aa, synthetic construct; identical to SEQ ID NO: 1426
  VARIANT 2: note = X can be any Amino Acid

SEQ ID NO: 1428 - protein, 271 aa, synthetic construct
MNYSPGLVSLILLLLGRTRGNSVTQMEGPVTLSEEAFLTINCTYTATGYPSLFWYVQYPGEGLQLLLKATKADDKGSNKGFEATYRKETTSFHLEKGSVQVSDSAVYFCALSTTGSSNTGKLIFGQGTTLQVKPNIQNPEPAVYQLKDPRSQDSTLCLFTDFDSQINVPKTMESGTFITDKCVLDMKAMDSKSNGAIAWSNQTSFTCQDIFKETNATYPSSDVPCDATLTEKSFETDMNLNFQNLLVIVLRILLLKVAGFNLLMTLRLWSS

SEQ ID NO: 1429 - protein, 271 aa, synthetic construct
MAYSPGLVSLILLLLGRTRGNSVTQMEGPVTLSEEAFLTINCTYTATGYPSLFWYVQYPGEGLQLLLKATKADDKGSNKGFEATYRKETTSFHLEKGSVQVSDSAVYFCALSTTGSSNTGKLIFGQGTTLQVKPNIQNPEPAVYQLKDPRSQDSTLCLFTDFDSQINVPKTMESGTFITDKCVLDMKAMDSKSNGAIAWSNQTSFTCQDIFKETNATYPSSDVPCDATLTEKSFETDMNLNFQNLLVIVLRILLLKVAGFNLLMTLRLWSS

SEQ ID NO: 1430 - protein, 271 aa, synthetic construct
MHYSPGLVSLILLLLGRTRGNSVTQMEGPVTLSEEAFLTINCTYTATGYPSLFWYVQYPGEGLQLLLKATKADDKGSNKGFEATYRKETTSFHLEKGSVQVSDSAVYFCALSTTGSSNTGKLIFGQGTTLQVKPNIQNPEPAVYQLKDPRSQDSTLCLFTDFDSQINVPKTMESGTFITDKCVLDMKAMDSKSNGAIAWSNQTSFTCQDIFKETNATYPSSDVPCDATLTEKSFETDMNLNFQNLLVIVLRILLLKVAGFNLLMTLRLWSS

SEQ ID NO: 1431 - protein, 6 aa, synthetic construct
DRGSQS

SEQ ID NO: 1432 - protein, 6 aa, synthetic construct
IYSNGD

SEQ ID NO: 1433 - protein, 9 aa, synthetic construct
AVSWYSTLT

SEQ ID NO: 1434 - protein, 110 aa, synthetic construct
QQKEVEQNSGPLSVPEGAIASLNCTYSDRGSQSFFWYRQYSGKSPELIMFIYSNGDKEDGRFTAQLNKASQYVSLLIRDSQPSDSATYLCAVSWYSTLTFGKGTMLLVSP

SEQ ID NO: 1435 - protein, 109 aa, synthetic construct
QKEVEQNSGPLSVPEGAIASLNCTYSDRGSQSFFWYRQYSGKSPELIMFIYSNGDKEDGRFTAQLNKASQYVSLLIRDSQPSDSATYLCAVSWYSTLTFGKGTMLLVSP

SEQ ID NO: 1436 - protein, 130 aa, synthetic construct
  VARIANT 2: note = X can be any Amino Acid
MXSLRVLLVILWLQLSWVWSQQKEVEQNSGPLSVPEGAIASLNCTYSDRGSQSFFWYRQYSGKSPELIMFIYSNGDKEDGRFTAQLNKASQYVSLLIRDSQPSDSATYLCAVSWYSTLTFGKGTMLLVSP

SEQ ID NO: 1437 - protein, 130 aa, synthetic construct; identical to SEQ ID NO: 1436
  VARIANT 2: note = X can be any Amino Acid

SEQ ID NO: 1438 - protein, 267 aa, synthetic construct
MKSLRVLLVILWLQLSWVWSQQKEVEQNSGPLSVPEGAIASLNCTYSDRGSQSFFWYRQYSGKSPELIMFIYSNGDKEDGRFTAQLNKASQYVSLLIRDSQPSDSATYLCAVSWYSTLTFGKGTMLLVSPNIQNPEPAVYQLKDPRSQDSTLCLFTDFDSQINVPKTMESGTFITDKCVLDMKAMDSKSNGAIAWSNQTSFTCQDIFKETNATYPSSDVPCDATLTEKSFETDMNLNFQNLLVIVLRILLLKVAGFNLLMTLRLWSS

SEQ ID NO: 1439 - protein, 267 aa, synthetic construct
MASLRVLLVILWLQLSWVWSQQKEVEQNSGPLSVPEGAIASLNCTYSDRGSQSFFWYRQYSGKSPELIMFIYSNGDKEDGRFTAQLNKASQYVSLLIRDSQPSDSATYLCAVSWYSTLTFGKGTMLLVSPNIQNPEPAVYQLKDPRSQDSTLCLFTDFDSQINVPKTMESGTFITDKCVLDMKAMDSKSNGAIAWSNQTSFTCQDIFKETNATYPSSDVPCDATLTEKSFETDMNLNFQNLLVIVLRILLLKVAGFNLLMTLRLWSS

SEQ ID NO: 1440 - protein, 267 aa, synthetic construct
MHSLRVLLVILWLQLSWVWSQQKEVEQNSGPLSVPEGAIASLNCTYSDRGSQSFFWYRQYSGKSPELIMFIYSNGDKEDGRFTAQLNKASQYVSLLIRDSQPSDSATYLCAVSWYSTLTFGKGTMLLVSPNIQNPEPAVYQLKDPRSQDSTLCLFTDFDSQINVPKTMESGTFITDKCVLDMKAMDSKSNGAIAWSNQTSFTCQDIFKETNATYPSSDVPCDATLTEKSFETDMNLNFQNLLVIVLRILLLKVAGFNLLMTLRLWSS

SEQ ID NO: 1441 - protein, 5 aa, synthetic construct
SVFSS

SEQ ID NO: 1442 - protein, 7 aa, synthetic construct
VVTGGEV

SEQ ID NO: 1443 - protein, 10 aa, synthetic construct
AGEFAGNQFY

SEQ ID NO: 1444 - protein, 109 aa, synthetic construct
QLLEQSPQFLSIQEGENLTVYCNSSSVFSSLQWYRQEPGEGPVLLVTVVTGGEVKKLKRLTFQFGDARKDSSLHITAAQPGDTGLYLCAGEFAGNQFYFGTGTSLTVIP

SEQ ID NO: 1445 - protein, 110 aa, synthetic construct
TQLLEQSPQFLSIQEGENLTVYCNSSSVFSSLQWYRQEPGEGPVLLVTVVTGGEVKKLKRLTFQFGDARKDSSLHITAAQPGDTGLYLCAGEFAGNQFYFGTGTSLTVIP

SEQ ID NO: 1446 - protein, 128 aa, synthetic construct
  VARIANT 2: note = X can be any Amino Acid
MXLKFSVSILWIQLAWVSTQLLEQSPQFLSIQEGENLTVYCNSSSVFSSLQWYRQEPGEGPVLLVTVVTGGEVKKLKRLTFQFGDARKDSSLHITAAQPGDTGLYLCAGEFAGNQFYFGTGTSLTVIP

SEQ ID NO: 1447 - protein, 128 aa, synthetic construct; identical to SEQ ID NO: 1446
  VARIANT 2: note = X can be any Amino Acid

SEQ ID NO: 1448 - protein, 265 aa, synthetic construct
MVLKFSVSILWIQLAWVSTQLLEQSPQFLSIQEGENLTVYCNSSSVFSSLQWYRQEPGEGPVLLVTVVTGGEVKKLKRLTFQFGDARKDSSLHITAAQPGDTGLYLCAGEFAGNQFYFGTGTSLTVIPNIQNPEPAVYQLKDPRSQDSTLCLFTDFDSQINVPKTMESGTFITDKCVLDMKAMDSKSNGAIAWSNQTSFTCQDIFKETNATYPSSDVPCDATLTEKSFETDMNLNFQNLLVIVLRILLLKVAGFNLLMTLRLWSS

SEQ ID NO: 1449 - protein, 265 aa, synthetic construct
MALKFSVSILWIQLAWVSTQLLEQSPQFLSIQEGENLTVYCNSSSVFSSLQWYRQEPGEGPVLLVTVVTGGEVKKLKRLTFQFGDARKDSSLHITAAQPGDTGLYLCAGEFAGNQFYFGTGTSLTVIPNIQNPEPAVYQLKDPRSQDSTLCLFTDFDSQINVPKTMESGTFITDKCVLDMKAMDSKSNGAIAWSNQTSFTCQDIFKETNATYPSSDVPCDATLTEKSFETDMNLNFQNLLVIVLRILLLKVAGFNLLMTLRLWSS

SEQ ID NO: 1450 - protein, 265 aa, synthetic construct
MHLKFSVSILWIQLAWVSTQLLEQSPQFLSIQEGENLTVYCNSSSVFSSLQWYRQEPGEGPVLLVTVVTGGEVKKLKRLTFQFGDARKDSSLHITAAQPGDTGLYLCAGEFAGNQFYFGTGTSLTVIPNIQNPEPAVYQLKDPRSQDSTLCLFTDFDSQINVPKTMESGTFITDKCVLDMKAMDSKSNGAIAWSNQTSFTCQDIFKETNATYPSSDVPCDATLTEKSFETDMNLNFQNLLVIVLRILLLKVAGFNLLMTLRLWSS

SEQ ID NO: 1451 - protein, 6 aa, synthetic construct
VSGNPY

SEQ ID NO: 1452 - protein, 8 aa, synthetic construct
YITGDNLV

SEQ ID NO: 1453 - protein, 14 aa, synthetic construct
AVRDNSGGSNYKLT

SEQ ID NO: 1454 - protein, 115 aa, synthetic construct
QSVAQPEDQVNVAEGNPLTVKCTYSVSGNPYLFWYVQYPNRGLQFLLKYITGDNLVKGSYGFEAEFNKSQTSFHLKKPSALVSDSALYFCAVRDNSGGSNYKLTFGKGTLLTVNP

SEQ ID NO: 1455 - protein, 116 aa, synthetic construct
AQSVAQPEDQVNVAEGNPLTVKCTYSVSGNPYLFWYVQYPNRGLQFLLKYITGDNLVKGSYGFEAEFNKSQTSFHLKKPSALVSDSALYFCAVRDNSGGSNYKLTFGKGTLLTVNP

SEQ ID NO: 1456 - protein, 135 aa, synthetic construct
  VARIANT 2: note = X can be any Amino Acid
MXSAPISMLAMLFTLSGLRAQSVAQPEDQVNVAEGNPLTVKCTYSVSGNPYLFWYVQYPNRGLQFLLKYITGDNLVKGSYGFEAEFNKSQTSFHLKKPSALVSDSALYFCAVRDNSGGSNYKLTFGKGTLLTVNP

SEQ ID NO: 1457 - protein, 135 aa, synthetic construct; identical to SEQ ID NO: 1456
  VARIANT 2: note = X can be any Amino Acid

SEQ ID NO: 1458 - protein, 272 aa, synthetic construct
MASAPISMLAMLFTLSGLRAQSVAQPEDQVNVAEGNPLTVKCTYSVSGNPYLFWYVQYPNRGLQFLLKYITGDNLVKGSYGFEAEFNKSQTSFHLKKPSALVSDSALYFCAVRDNSGGSNYKLTFGKGTLLTVNPNIQNPEPAVYQLKDPRSQDSTLCLFTDFDSQINVPKTMESGTFITDKCVLDMKAMDSKSNGAIAWSNQTSFTCQDIFKETNATYPSSDVPCDATLTEKSFETDMNLNFQNLLVIVLRILLLKVAGFNLLMTLRLWSS

SEQ ID NO: 1459 - protein, 272 aa, synthetic construct; identical to SEQ ID NO: 1458

SEQ ID NO: 1460 - protein, 272 aa, synthetic construct
MHSAPISMLAMLFTLSGLRAQSVAQPEDQVNVAEGNPLTVKCTYSVSGNPYLFWYVQYPNRGLQFLLKYITGDNLVKGSYGFEAEFNKSQTSFHLKKPSALVSDSALYFCAVRDNSGGSNYKLTFGKGTLLTVNPNIQNPEPAVYQLKDPRSQDSTLCLFTDFDSQINVPKTMESGTFITDKCVLDMKAMDSKSNGAIAWSNQTSFTCQDIFKETNATYPSSDVPCDATLTEKSFETDMNLNFQNLLVIVLRILLLKVAGFNLLMTLRLWSS

SEQ ID NO: 1461 - protein, 6 aa, synthetic construct
SSVSVY

SEQ ID NO: 1462 - protein, 8 aa, synthetic construct
YLSGSTLV

SEQ ID NO: 1463 - protein, 12 aa, synthetic construct
AVRGSSGTYKYI

SEQ ID NO: 1464 - protein, 113 aa, synthetic construct
QSVTQLDSQVPVFEEAPVELRCNYSSSVSVYLFWYVQYPNQGLQLLLKYLSGSTLVESINGFEAEFNKSQTSFHLRKPSVHISDTAEYFCAVRGSSGTYKYIFGTGTRLKVLA

SEQ ID NO: 1465 - protein, 114 aa, synthetic construct
AQSVTQLDSQVPVFEEAPVELRCNYSSSVSVYLFWYVQYPNQGLQLLLKYLSGSTLVESINGFEAEFNKSQTSFHLRKPSVHISDTAEYFCAVRGSSGTYKYIFGTGTRLKVLA

SEQ ID NO: 1466 - protein, 133 aa, synthetic construct
  VARIANT 2: note = X can be any Amino Acid
MXLLLVPAFQVIFTLGGTRAQSVTQLDSQVPVFEEAPVELRCNYSSSVSVYLFWYVQYPNQGLQLLLKYLSGSTLVESINGFEAEFNKSQTSFHLRKPSVHISDTAEYFCAVRGSSGTYKYIFGTGTRLKVLA

SEQ ID NO: 1467 - protein, 133 aa, synthetic construct; identical to SEQ ID NO: 1466
  VARIANT 2: note = X can be any Amino Acid

SEQ ID NO: 1468 - protein, 270 aa, synthetic construct
MLLLLVPAFQVIFTLGGTRAQSVTQLDSQVPVFEEAPVELRCNYSSSVSVYLFWYVQYPNQGLQLLLKYLSGSTLVESINGFEAEFNKSQTSFHLRKPSVHISDTAEYFCAVRGSSGTYKYIFGTGTRLKVLANIQNPEPAVYQLKDPRSQDSTLCLFTDFDSQINVPKTMESGTFITDKCVLDMKAMDSKSNGAIAWSNQTSFTCQDIFKETNATYPSSDVPCDATLTEKSFETDMNLNFQNLLVIVLRILLLKVAGFNLLMTLRLWSS

SEQ ID NO: 1469 - protein, 270 aa, synthetic construct
MALLLVPAFQVIFTLGGTRAQSVTQLDSQVPVFEEAPVELRCNYSSSVSVYLFWYVQYPNQGLQLLLKYLSGSTLVESINGFEAEFNKSQTSFHLRKPSVHISDTAEYFCAVRGSSGTYKYIFGTGTRLKVLANIQNPEPAVYQLKDPRSQDSTLCLFTDFDSQINVPKTMESGTFITDKCVLDMKAMDSKSNGAIAWSNQTSFTCQDIFKETNATYPSSDVPCDATLTEKSFETDMNLNFQNLLVIVLRILLLKVAGFNLLMTLRLWSS

SEQ ID NO: 1470 - protein, 270 aa, synthetic construct
MHLLLVPAFQVIFTLGGTRAQSVTQLDSQVPVFEEAPVELRCNYSSSVSVYLFWYVQYPNQGLQLLLKYLSGSTLVESINGFEAEFNKSQTSFHLRKPSVHISDTAEYFCAVRGSSGTYKYIFGTGTRLKVLANIQNPEPAVYQLKDPRSQDSTLCLFTDFDSQINVPKTMESGTFITDKCVLDMKAMDSKSNGAIAWSNQTSFTCQDIFKETNATYPSSDVPCDATLTEKSFETDMNLNFQNLLVIVLRILLLKVAGFNLLMTLRLWSS

SEQ ID NO: 1471 - protein, 6 aa, synthetic construct
TSGFNG

SEQ ID NO: 1472 - protein, 6 aa, synthetic construct
NVLDGL

SEQ ID NO: 1473 - protein, 13 aa, synthetic construct
AVRDLQTGANNLF

SEQ ID NO: 1474 - protein, 111 aa, synthetic construct
QNIDQPTEMTATEGAIVQINCTYQTSGFNGLFWYQQHAGEAPTFLSYNVLDGLEEKGRFSSFLSRSKGYSYLLLKELQMKDSASYLCAVRDLQTGANNLFFGTGTRLTVIP

SEQ ID NO: 1475 - protein, 112 aa, synthetic construct
GQNIDQPTEMTATEGAIVQINCTYQTSGFNGLFWYQQHAGEAPTFLSYNVLDGLEEKGRFSSFLSRSKGYSYLLLKELQMKDSASYLCAVRDLQTGANNLFFGTGTRLTVIP

SEQ ID NO: 1476 - protein, 129 aa, synthetic construct
  VARIANT 2: note = X can be any Amino Acid
MXGVFLLYVSMKMGGTTGQNIDQPTEMTATEGAIVQINCTYQTSGFNGLFWYQQHAGEAPTFLSYNVLDGLEEKGRFSSFLSRSKGYSYLLLKELQMKDSASYLCAVRDLQTGANNLFFGTGTRLTVIP

SEQ ID NO: 1477 - protein, 129 aa, synthetic construct; identical to SEQ ID NO: 1476
  VARIANT 2: note = X can be any Amino Acid

SEQ ID NO: 1478 - protein, 266 aa, synthetic construct
MWGVFLLYVSMKMGGTTGQNIDQPTEMTATEGAIVQINCTYQTSGFNGLFWYQQHAGEAPTFLSYNVLDGLEEKGRFSSFLSRSKGYSYLLLKELQMKDSASYLCAVRDLQTGANNLFFGTGTRLTVIPNIQNPEPAVYQLKDPRSQDSTLCLFTDFDSQINVPKTMESGTFITDKCVLDMKAMDSKSNGAIAWSNQTSFTCQDIFKETNATYPSSDVPCDATLTEKSFETDMNLNFQNLLVIVLRILLLKVAGFNLLMTLRLWSS

SEQ ID NO: 1479 - protein, 266 aa, synthetic construct
MAGVFLLYVSMKMGGTTGQNIDQPTEMTATEGAIVQINCTYQTSGFNGLFWYQQHAGEAPTFLSYNVLDGLEEKGRFSSFLSRSKGYSYLLLKELQMKDSASYLCAVRDLQTGANNLFFGTGTRLTVIPNIQNPEPAVYQLKDPRSQDSTLCLFTDFDSQINVPKTMESGTFITDKCVLDMKAMDSKSNGAIAWSNQTSFTCQDIFKETNATYPSSDVPCDATLTEKSFETDMNLNFQNLLVIVLRILLLKVAGFNLLMTLRLWSS

SEQ ID NO: 1480 - protein, 266 aa, synthetic construct
MHGVFLLYVSMKMGGTTGQNIDQPTEMTATEGAIVQINCTYQTSGFNGLFWYQQHAGEAPTFLSYNVLDGLEEKGRFSSFLSRSKGYSYLLLKELQMKDSASYLCAVRDLQTGANNLFFGTGTRLTVIPNIQNPEPAVYQLKDPRSQDSTLCLFTDFDSQINVPKTMESGTFITDKCVLDMKAMDSKSNGAIAWSNQTSFTCQDIFKETNATYPSSDVPCDATLTEKSFETDMNLNFQNLLVIVLRILLLKVAGFNLLMTLRLWSS

SEQ ID NO: 1481 - protein, 6 aa, synthetic construct
TSGFNG

SEQ ID NO: 1482 - protein, 6 aa, synthetic construct
NVLDGL

SEQ ID NO: 1483 - protein, 12 aa, synthetic construct
AFYYGGSQGNLI

SEQ ID NO: 1484 - protein, 110 aa, synthetic construct
QNIDQPTEMTATEGAIVQINCTYQTSGFNGLFWYQQHAGEAPTFLSYNVLDGLEEKGRFSSFLSRSKGYSYLLLKELQMKDSASYLCAFYYGGSQGNLIFGKGTKLSVKP

SEQ ID NO: 1485 - protein, 111 aa, synthetic construct
GQNIDQPTEMTATEGAIVQINCTYQTSGFNGLFWYQQHAGEAPTFLSYNVLDGLEEKGRFSSFLSRSKGYSYLLLKELQMKDSASYLCAFYYGGSQGNLIFGKGTKLSVKP

SEQ ID NO: 1486 - protein, 128 aa, synthetic construct
  VARIANT 2: note = X can be any Amino Acid
MXGVFLLYVSMKMGGTTGQNIDQPTEMTATEGAIVQINCTYQTSGFNGLFWYQQHAGEAPTFLSYNVLDGLEEKGRFSSFLSRSKGYSYLLLKELQMKDSASYLCAFYYGGSQGNLIFGKGTKLSVKP

SEQ ID NO: 1487 - protein, 128 aa, synthetic construct; identical to SEQ ID NO: 1486
  VARIANT 2: note = X can be any Amino Acid

SEQ ID NO: 1488 - protein, 265 aa, synthetic construct
MWGVFLLYVSMKMGGTTGQNIDQPTEMTATEGAIVQINCTYQTSGFNGLFWYQQHAGEAPTFLSYNVLDGLEEKGRFSSFLSRSKGYSYLLLKELQMKDSASYLCAFYYGGSQGNLIFGKGTKLSVKPNIQNPEPAVYQLKDPRSQDSTLCLFTDFDSQINVPKTMESGTFITDKCVLDMKAMDSKSNGAIAWSNQTSFTCQDIFKETNATYPSSDVPCDATLTEKSFETDMNLNFQNLLVIVLRILLLKVAGFNLLMTLRLWSS

SEQ ID NO: 1489 - protein, 265 aa, synthetic construct
MAGVFLLYVSMKMGGTTGQNIDQPTEMTATEGAIVQINCTYQTSGFNGLFWYQQHAGEAPTFLSYNVLDGLEEKGRFSSFLSRSKGYSYLLLKELQMKDSASYLCAFYYGGSQGNLIFGKGTKLSVKPNIQNPEPAVYQLKDPRSQDSTLCLFTDFDSQINVPKTMESGTFITDKCVLDMKAMDSKSNGAIAWSNQTSFTCQDIFKETNATYPSSDVPCDATLTEKSFETDMNLNFQNLLVIVLRILLLKVAGFNLLMTLRLWSS

SEQ ID NO: 1490 - protein, 265 aa, synthetic construct
MHGVFLLYVSMKMGGTTGQNIDQPTEMTATEGAIVQINCTYQTSGFNGLFWYQQHAGEAPTFLSYNVLDGLEEKGRFSSFLSRSKGYSYLLLKELQMKDSASYLCAFYYGGSQGNLIFGKGTKLSVKPNIQNPEPAVYQLKDPRSQDSTLCLFTDFDSQINVPKTMESGTFITDKCVLDMKAMDSKSNGAIAWSNQTSFTCQDIFKETNATYPSSDVPCDATLTEKSFETDMNLNFQNLLVIVLRILLLKVAGFNLLMTLRLWSS

SEQ ID NO: 1491 - protein, 6 aa, synthetic construct
VTNFRS

SEQ ID NO: 1492 - protein, 7 aa, synthetic construct
LTSSGIE

SEQ ID NO: 1493 - protein, 13 aa, synthetic construct
AGQNYGGSQGNLI

SEQ ID NO: 1494 - protein, 113 aa, synthetic construct
EDKVVQSPLSLVVHEGDTVTLNCSYEVTNFRSLLWYKQEKKAPTFLFMLTSSGIEKKSGRLSSILDKKELSSILNITATQTGDSAIYLCAGQNYGGSQGNLIFGKGTKLSVKP

SEQ ID NO: 1495 - protein, 113 aa, synthetic construct; identical to SEQ ID NO: 1494

SEQ ID NO: 1496 - protein, 134 aa, synthetic construct
  VARIANT 2: note = X can be any Amino Acid
MXKCPQALLAIFWLLLSWVSSEDKVVQSPLSLVVHEGDTVTLNCSYEVTNFRSLLWYKQEKKAPTFLFMLTSSGIEKKSGRLSSILDKKELSSILNITATQTGDSAIYLCAGQNYGGSQGNLIFGKGTKLSVKP

SEQ ID NO: 1497 - protein, 134 aa, synthetic construct; identical to SEQ ID NO: 1496
  VARIANT 2: note = X can be any Amino Acid

SEQ ID NO: 1498 - protein, 271 aa, synthetic construct
MMKCPQALLAIFWLLLSWVSSEDKVVQSPLSLVVHEGDTVTLNCSYEVTNFRSLLWYKQEKKAPTFLFMLTSSGIEKKSGRLSSILDKKELSSILNITATQTGDSAIYLCAGQNYGGSQGNLIFGKGTKLSVKPNIQNPEPAVYQLKDPRSQDSTLCLFTDFDSQINVPKTMESGTFITDKCVLDMKAMDSKSNGAIAWSNQTSFTCQDIFKETNATYPSSDVPCDATLTEKSFETDMNLNFQNLLVIVLRILLLKVAGFNLLMTLRLWSS

SEQ ID NO: 1499 - protein, 271 aa, synthetic construct
MAKCPQALLAIFWLLLSWVSSEDKVVQSPLSLVVHEGDTVTLNCSYEVTNFRSLLWYKQEKKAPTFLFMLTSSGIEKKSGRLSSILDKKELSSILNITATQTGDSAIYLCAGQNYGGSQGNLIFGKGTKLSVKPNIQNPEPAVYQLKDPRSQDSTLCLFTDFDSQINVPKTMESGTFITDKCVLDMKAMDSKSNGAIAWSNQTSFTCQDIFKETNATYPSSDVPCDATLTEKSFETDMNLNFQNLLVIVLRILLLKVAGFNLLMTLRLWSS

SEQ ID NO: 1500 - protein, 271 aa, synthetic construct
MHKCPQALLAIFWLLLSWVSSEDKVVQSPLSLVVHEGDTVTLNCSYEVTNFRSLLWYKQEKKAPTFLFMLTSSGIEKKSGRLSSILDKKELSSILNITATQTGDSAIYLCAGQNYGGSQGNLIFGKGTKLSVKPNIQNPEPAVYQLKDPRSQDSTLCLFTDFDSQINVPKTMESGTFITDKCVLDMKAMDSKSNGAIAWSNQTSFTCQDIFKETNATYPSSDVPCDATLTEKSFETDMNLNFQNLLVIVLRILLLKVAGFNLLMTLRLWSS

SEQ ID NO: 1501 - protein, 6 aa, synthetic construct
DRGSQS

SEQ ID NO: 1502 - protein, 6 aa, synthetic construct
IYSNGD

SEQ ID NO: 1503 - protein, 12 aa, synthetic construct
AVTLCGGYNKLI

SEQ ID NO: 1504 - protein, 113 aa, synthetic construct
QQKEVEQNSGPLSVPEGAIASLNCTYSDRGSQSFFWYRQYSGKSPELIMFIYSNGDKEDGRFTAQLNKASQYVSLLIRDSQPSDSATYLCAVTLCGGYNKLIFGAGTRLAVHP

SEQ ID NO: 1505 - protein, 112 aa, synthetic construct
QKEVEQNSGPLSVPEGAIASLNCTYSDRGSQSFFWYRQYSGKSPELIMFIYSNGDKEDGRFTAQLNKASQYVSLLIRDSQPSDSATYLCAVTLCGGYNKLIFGAGTRLAVHP

SEQ ID NO: 1506 - protein, 133 aa, synthetic construct
  VARIANT 2: note = X can be any Amino Acid
MXSLRVLLVILWLQLSWVWSQQKEVEQNSGPLSVPEGAIASLNCTYSDRGSQSFFWYRQYSGKSPELIMFIYSNGDKEDGRFTAQLNKASQYVSLLIRDSQPSDSATYLCAVTLCGGYNKLIFGAGTRLAVHP

SEQ ID NO: 1507 - protein, 133 aa, synthetic construct; identical to SEQ ID NO: 1506
  VARIANT 2: note = X can be any Amino Acid

SEQ ID NO: 1508 - protein, 270 aa, synthetic construct
MKSLRVLLVILWLQLSWVWSQQKEVEQNSGPLSVPEGAIASLNCTYSDRGSQSFFWYRQYSGKSPELIMFIYSNGDKEDGRFTAQLNKASQYVSLLIRDSQPSDSATYLCAVTLCGGYNKLIFGAGTRLAVHPNIQNPEPAVYQLKDPRSQDSTLCLFTDFDSQINVPKTMESGTFITDKCVLDMKAMDSKSNGAIAWSNQTSFTCQDIFKETNATYPSSDVPCDATLTEKSFETDMNLNFQNLLVIVLRILLLKVAGFNLLMTLRLWSS

SEQ ID NO: 1509 - protein, 270 aa, synthetic construct
MASLRVLLVILWLQLSWVWSQQKEVEQNSGPLSVPEGAIASLNCTYSDRGSQSFFWYRQYSGKSPELIMFIYSNGDKEDGRFTAQLNKASQYVSLLIRDSQPSDSATYLCAVTLCGGYNKLIFGAGTRLAVHPNIQNPEPAVYQLKDPRSQDSTLCLFTDFDSQINVPKTMESGTFITDKCVLDMKAMDSKSNGAIAWSNQTSFTCQDIFKETNATYPSSDVPCDATLTEKSFETDMNLNFQNLLVIVLRILLLKVAGFNLLMTLRLWSS

SEQ ID NO: 1510 - protein, 270 aa, synthetic construct
MHSLRVLLVILWLQLSWVWSQQKEVEQNSGPLSVPEGAIASLNCTYSDRGSQSFFWYRQYSGKSPELIMFIYSNGDKEDGRFTAQLNKASQYVSLLIRDSQPSDSATYLCAVTLCGGYNKLIFGAGTRLAVHPNIQNPEPAVYQLKDPRSQDSTLCLFTDFDSQINVPKTMESGTFITDKCVLDMKAMDSKSNGAIAWSNQTSFTCQDIFKETNATYPSSDVPCDATLTEKSFETDMNLNFQNLLVIVLRILLLKVAGFNLLMTLRLWSS

SEQ ID NO: 1511 - protein, 6 aa, synthetic construct
SSVSVY

SEQ ID NO: 1512 - protein, 8 aa, synthetic construct
YLSGSTLV

SEQ ID NO: 1513 - protein, 12 aa, synthetic construct
AVSDLVRDDKII

SEQ ID NO: 1514 - protein, 113 aa, synthetic construct
QSVTQLDSQVPVFEEAPVELRCNYSSSVSVYLFWYVQYPNQGLQLLLKYLSGSTLVESINGFEAEFNKSQTSFHLRKPSVHISDTAEYFCAVSDLVRDDKIIFGKGTRLHILP

SEQ ID NO: 1515 - protein, 114 aa, synthetic construct
AQSVTQLDSQVPVFEEAPVELRCNYSSSVSVYLFWYVQYPNQGLQLLLKYLSGSTLVESINGFEAEFNKSQTSFHLRKPSVHISDTAEYFCAVSDLVRDDKIIFGKGTRLHILP

SEQ ID NO: 1516 - protein, 133 aa, synthetic construct
  VARIANT 2: note = X can be any Amino Acid
MXLLLVPAFQVIFTLGGTRAQSVTQLDSQVPVFEEAPVELRCNYSSSVSVYLFWYVQYPNQGLQLLLKYLSGSTLVESINGFEAEFNKSQTSFHLRKPSVHISDTAEYFCAVSDLVRDDKIIFGKGTRLHILP

SEQ ID NO: 1517 - protein, 133 aa, synthetic construct; identical to SEQ ID NO: 1516
  VARIANT 2: note = X can be any Amino Acid

SEQ ID NO: 1518 - protein, 270 aa, synthetic construct
MLLLLVPAFQVIFTLGGTRAQSVTQLDSQVPVFEEAPVELRCNYSSSVSVYLFWYVQYPNQGLQLLLKYLSGSTLVESINGFEAEFNKSQTSFHLRKPSVHISDTAEYFCAVSDLVRDDKIIFGKGTRLHILPNIQNPEPAVYQLKDPRSQDSTLCLFTDFDSQINVPKTMESGTFITDKCVLDMKAMDSKSNGAIAWSNQTSFTCQDIFKETNATYPSSDVPCDATLTEKSFETDMNLNFQNLLVIVLRILLLKVAGFNLLMTLRLWSS

SEQ ID NO: 1519 - protein, 270 aa, synthetic construct
MALLLVPAFQVIFTLGGTRAQSVTQLDSQVPVFEEAPVELRCNYSSSVSVYLFWYVQYPNQGLQLLLKYLSGSTLVESINGFEAEFNKSQTSFHLRKPSVHISDTAEYFCAVSDLVRDDKIIFGKGTRLHILPNIQNPEPAVYQLKDPRSQDSTLCLFTDFDSQINVPKTMESGTFITDKCVLDMKAMDSKSNGAIAWSNQTSFTCQDIFKETNATYPSSDVPCDATLTEKSFETDMNLNFQNLLVIVLRILLLKVAGFNLLMTLRLWSS

SEQ ID NO: 1520 - protein, 270 aa, synthetic construct
MHLLLVPAFQVIFTLGGTRAQSVTQLDSQVPVFEEAPVELRCNYSSSVSVYLFWYVQYPNQGLQLLLKYLSGSTLVESINGFEAEFNKSQTSFHLRKPSVHISDTAEYFCAVSDLVRDDKIIFGKGTRLHILPNIQNPEPAVYQLKDPRSQDSTLCLFTDFDSQINVPKTMESGTFITDKCVLDMKAMDSKSNGAIAWSNQTSFTCQDIFKETNATYPSSDVPCDATLTEKSFETDMNLNFQNLLVIVLRILLLKVAGFNLLMTLRLWSS

SEQ ID NO: 1521 - protein, 6 aa, synthetic construct
TSGFNG

SEQ ID NO: 1522 - protein, 6 aa, synthetic construct
NVLDGL

SEQ ID NO: 1523 - protein, 12 aa, synthetic construct
AVYPGGSQGNLI

SEQ ID NO: 1524 - protein, 110 aa, synthetic construct
QNIDQPTEMTATEGAIVQINCTYQTSGFNGLFWYQQHAGEAPTFLSYNVLDGLEEKGRFSSFLSRSKGYSYLLLKELQMKDSASYLCAVYPGGSQGNLIFGKGTKLSVKP

SEQ ID NO: 1525 - protein, 111 aa, synthetic construct
GQNIDQPTEMTATEGAIVQINCTYQTSGFNGLFWYQQHAGEAPTFLSYNVLDGLEEKGRFSSFLSRSKGYSYLLLKELQMKDSASYLCAVYPGGSQGNLIFGKGTKLSVKP

SEQ ID NO: 1526 - protein, 128 aa, synthetic construct
  VARIANT 2: note = X can be any Amino Acid
MXGVFLLYVSMKMGGTTGQNIDQPTEMTATEGAIVQINCTYQTSGFNGLFWYQQHAGEAPTFLSYNVLDGLEEKGRFSSFLSRSKGYSYLLLKELQMKDSASYLCAVYPGGSQGNLIFGKGTKLSVKP

SEQ ID NO: 1527 - protein, 128 aa, synthetic construct; identical to SEQ ID NO: 1526
  VARIANT 2: note = X can be any Amino Acid

SEQ ID NO: 1528 - protein, 265 aa, synthetic construct
MWGVFLLYVSMKMGGTTGQNIDQPTEMTATEGAIVQINCTYQTSGFNGLFWYQQHAGEAPTFLSYNVLDGLEEKGRFSSFLSRSKGYSYLLLKELQMKDSASYLCAVYPGGSQGNLIFGKGTKLSVKPNIQNPEPAVYQLKDPRSQDSTLCLFTDFDSQINVPKTMESGTFITDKCVLDMKAMDSKSNGAIAWSNQTSFTCQDIFKETNATYPSSDVPCDATLTEKSFETDMNLNFQNLLVIVLRILLLKVAGFNLLMTLRLWSS

SEQ ID NO: 1529 - protein, 265 aa, synthetic construct
MAGVFLLYVSMKMGGTTGQNIDQPTEMTATEGAIVQINCTYQTSGFNGLFWYQQHAGEAPTFLSYNVLDGLEEKGRFSSFLSRSKGYSYLLLKELQMKDSASYLCAVYPGGSQGNLIFGKGTKLSVKPNIQNPEPAVYQLKDPRSQDSTLCLFTDFDSQINVPKTMESGTFITDKCVLDMKAMDSKSNGAIAWSNQTSFTCQDIFKETNATYPSSDVPCDATLTEKSFETDMNLNFQNLLVIVLRILLLKVAGFNLLMTLRLWSS

SEQ ID NO: 1530 - protein, 265 aa, synthetic construct
MHGVFLLYVSMKMGGTTGQNIDQPTEMTATEGAIVQINCTYQTSGFNGLFWYQQHAGEAPTFLSYNVLDGLEEKGRFSSFLSRSKGYSYLLLKELQMKDSASYLCAVYPGGSQGNLIFGKGTKLSVKPNIQNPEPAVYQLKDPRSQDSTLCLFTDFDSQINVPKTMESGTFITDKCVLDMKAMDSKSNGAIAWSNQTSFTCQDIFKETNATYPSSDVPCDATLTEKSFETDMNLNFQNLLVIVLRILLLKVAGFNLLMTLRLWSS

SEQ ID NO: 1531 - protein, 6 aa, synthetic construct
DRGSQS

SEQ ID NO: 1532 - protein, 6 aa, synthetic construct
IYSNGD

SEQ ID NO: 1533 - protein, 12 aa, synthetic construct
AVTLSGGYNKLI

SEQ ID NO: 1534 - protein, 113 aa, synthetic construct
QQKEVEQNSGPLSVPEGAIASLNCTYSDRGSQSFFWYRQYSGKSPELIMFIYSNGDKEDGRFTAQLNKASQYVSLLIRDSQPSDSATYLCAVTLSGGYNKLIFGAGTRLAVHP

SEQ ID NO: 1535 - protein, 112 aa, synthetic construct
QKEVEQNSGPLSVPEGAIASLNCTYSDRGSQSFFWYRQYSGKSPELIMFIYSNGDKEDGRFTAQLNKASQYVSLLIRDSQPSDSATYLCAVTLSGGYNKLIFGAGTRLAVHP

SEQ ID NO: 1536 - protein, 133 aa, synthetic construct
  VARIANT 2: note = X can be any Amino Acid
MXSLRVLLVILWLQLSWVWSQQKEVEQNSGPLSVPEGAIASLNCTYSDRGSQSFFWYRQYSGKSPELIMFIYSNGDKEDGRFTAQLNKASQYVSLLIRDSQPSDSATYLCAVTLSGGYNKLIFGAGTRLAVHP

SEQ ID NO: 1537 - protein, 133 aa, synthetic construct; identical to SEQ ID NO: 1536
  VARIANT 2: note = X can be any Amino Acid

SEQ ID NO: 1538 - protein, 270 aa, synthetic construct
MKSLRVLLVILWLQLSWVWSQQKEVEQNSGPLSVPEGAIASLNCTYSDRGSQSFFWYRQYSGKSPELIMFIYSNGDKEDGRFTAQLNKASQYVSLLIRDSQPSDSATYLCAVTLSGGYNKLIFGAGTRLAVHPNIQNPEPAVYQLKDPRSQDSTLCLFTDFDSQINVPKTMESGTFITDKCVLDMKAMDSKSNGAIAWSNQTSFTCQDIFKETNATYPSSDVPCDATLTEKSFETDMNLNFQNLLVIVLRILLLKVAGFNLLMTLRLWSS

SEQ ID NO: 1539 - protein, 270 aa, synthetic construct
MASLRVLLVILWLQLSWVWSQQKEVEQNSGPLSVPEGAIASLNCTYSDRGSQSFFWYRQYSGKSPELIMFIYSNGDKEDGRFTAQLNKASQYVSLLIRDSQPSDSATYLCAVTLSGGYNKLIFGAGTRLAVHPNIQNPEPAVYQLKDPRSQDSTLCLFTDFDSQINVPKTMESGTFITDKCVLDMKAMDSKSNGAIAWSNQTSFTCQDIFKETNATYPSSDVPCDATLTEKSFETDMNLNFQNLLVIVLRILLLKVAGFNLLMTLRLWSS

SEQ ID NO: 1540 - protein, 270 aa, synthetic construct
MHSLRVLLVILWLQLSWVWSQQKEVEQNSGPLSVPEGAIASLNCTYSDRGSQSFFWYRQYSGKSPELIMFIYSNGDKEDGRFTAQLNKASQYVSLLIRDSQPSDSATYLCAVTLSGGYNKLIFGAGTRLAVHPNIQNPEPAVYQLKDPRSQDSTLCLFTDFDSQINVPKTMESGTFITDKCVLDMKAMDSKSNGAIAWSNQTSFTCQDIFKETNATYPSSDVPCDATLTEKSFETDMNLNFQNLLVIVLRILLLKVAGFNLLMTLRLWSS

SEQ ID NO: 1541 - protein, 6 aa, synthetic construct
NSASDY

SEQ ID NO: 1542 - protein, 7 aa, synthetic construct
IRSNMDK

SEQ ID NO: 1543 - protein, 11 aa, synthetic construct
AEYIQGAQKLV

SEQ ID NO: 1544 - protein, 111 aa, synthetic construct
ESVGLHLPTLSVQEGDNSIINCAYSNSASDYFIWYKQESGKGPQFIIDIRSNMDKRQGQRVTVLLNKTVKHLSLQIAATQPGDSAVYFCAEYIQGAQKLVFGQGTRLTINP

SEQ ID NO: 1545 - protein, 112 aa, synthetic construct
GESVGLHLPTLSVQEGDNSIINCAYSNSASDYFIWYKQESGKGPQFIIDIRSNMDKRQGQRVTVLLNKTVKHLSLQIAATQPGDSAVYFCAEYIQGAQKLVFGQGTRLTINP

SEQ ID NO: 1546 - protein, 132 aa, synthetic construct
  VARIANT 2: note = X can be any Amino Acid
MXGIRALFMYLWLQLDWVSRGESVGLHLPTLSVQEGDNSIINCAYSNSASDYFIWYKQESGKGPQFIIDIRSNMDKRQGQRVTVLLNKTVKHLSLQIAATQPGDSAVYFCAEYIQGAQKLVFGQGTRLTINP

SEQ ID NO: 1547 - protein, 132 aa, synthetic construct; identical to SEQ ID NO: 1546
  VARIANT 2: note = X can be any Amino Acid

SEQ ID NO: 1548 - protein, 269 aa, synthetic construct
MAGIRALFMYLWLQLDWVSRGESVGLHLPTLSVQEGDNSIINCAYSNSASDYFIWYKQESGKGPQFIIDIRSNMDKRQGQRVTVLLNKTVKHLSLQIAATQPGDSAVYFCAEYIQGAQKLVFGQGTRLTINPNIQNPEPAVYQLKDPRSQDSTLCLFTDFDSQINVPKTMESGTFITDKCVLDMKAMDSKSNGAIAWSNQTSFTCQDIFKETNATYPSSDVPCDATLTEKSFETDMNLNFQNLLVIVLRILLLKVAGFNLLMTLRLWSS

SEQ ID NO: 1549 - protein, 269 aa, synthetic construct; identical to SEQ ID NO: 1548

SEQ ID NO: 1550 - protein, 269 aa, synthetic construct
MHGIRALFMYLWLQLDWVSRGESVGLHLPTLSVQEGDNSIINCAYSNSASDYFIWYKQESGKGPQFIIDIRSNMDKRQGQRVTVLLNKTVKHLSLQIAATQPGDSAVYFCAEYIQGAQKLVFGQGTRLTINPNIQNPEPAVYQLKDPRSQDSTLCLFTDFDSQINVPKTMESGTFITDKCVLDMKAMDSKSNGAIAWSNQTSFTCQDIFKETNATYPSSDVPCDATLTEKSFETDMNLNFQNLLVIVLRILLLKVAGFNLLMTLRLWSS

SEQ ID NO: 1551 - protein, 6 aa, synthetic construct
DRGSQS

SEQ ID NO: 1552 - protein, 6 aa, synthetic construct
IYSNGD

SEQ ID NO: 1553 - protein, 14 aa, synthetic construct
AVNPPVKTSYDKVI

SEQ ID NO: 1554 - protein, 115 aa, synthetic construct
QQKEVEQNSGPLSVPEGAIASLNCTYSDRGSQSFFWYRQYSGKSPELIMFIYSNGDKEDGRFTAQLNKASQYVSLLIRDSQPSDSATYLCAVNPPVKTSYDKVIFGPGTSLSVIP

SEQ ID NO: 1555 - protein, 114 aa, synthetic construct
QKEVEQNSGPLSVPEGAIASLNCTYSDRGSQSFFWYRQYSGKSPELIMFIYSNGDKEDGRFTAQLNKASQYVSLLIRDSQPSDSATYLCAVNPPVKTSYDKVIFGPGTSLSVIP

SEQ ID NO: 1556 - protein, 135 aa, synthetic construct
  VARIANT 2: note = X can be any Amino Acid
MXSLRVLLVILWLQLSWVWSQQKEVEQNSGPLSVPEGAIASLNCTYSDRGSQSFFWYRQYSGKSPELIMFIYSNGDKEDGRFTAQLNKASQYVSLLIRDSQPSDSATYLCAVNPPVKTSYDKVIFGPGTSLSVIP

SEQ ID NO: 1557 - protein, 135 aa, synthetic construct; identical to SEQ ID NO: 1556
  VARIANT 2: note = X can be any Amino Acid

SEQ ID NO: 1558 - protein, 272 aa, synthetic construct
MKSLRVLLVILWLQLSWVWSQQKEVEQNSGPLSVPEGAIASLNCTYSDRGSQSFFWYRQYSGKSPELIMFIYSNGDKEDGRFTAQLNKASQYVSLLIRDSQPSDSATYLCAVNPPVKTSYDKVIFGPGTSLSVIPNIQNPEPAVYQLKDPRSQDSTLCLFTDFDSQINVPKTMESGTFITDKCVLDMKAMDSKSNGAIAWSNQTSFTCQDIFKETNATYPSSDVPCDATLTEKSFETDMNLNFQNLLVIVLRILLLKVAGFNLLMTLRLWSS

SEQ ID NO: 1559 - protein, 272 aa, synthetic construct
MASLRVLLVILWLQLSWVWSQQKEVEQNSGPLSVPEGAIASLNCTYSDRGSQSFFWYRQYSGKSPELIMFIYSNGDKEDGRFTAQLNKASQYVSLLIRDSQPSDSATYLCAVNPPVKTSYDKVIFGPGTSLSVIPNIQNPEPAVYQLKDPRSQDSTLCLFTDFDSQINVPKTMESGTFITDKCVLDMKAMDSKSNGAIAWSNQTSFTCQDIFKETNATYPSSDVPCDATLTEKSFETDMNLNFQNLLVIVLRILLLKVAGFNLLMTLRLWSS

SEQ ID NO: 1560 - protein, 272 aa, synthetic construct
MHSLRVLLVILWLQLSWVWSQQKEVEQNSGPLSVPEGAIASLNCTYSDRGSQSFFWYRQYSGKSPELIMFIYSNGDKEDGRFTAQLNKASQYVSLLIRDSQPSDSATYLCAVNPPVKTSYDKVIFGPGTSLSVIPNIQNPEPAVYQLKDPRSQDSTLCLFTDFDSQINVPKTMESGTFITDKCVLDMKAMDSKSNGAIAWSNQTSFTCQDIFKETNATYPSSDVPCDATLTEKSFETDMNLNFQNLLVIVLRILLLKVAGFNLLMTLRLWSS

SEQ ID NO: 1561 - protein, 6 aa, synthetic construct
TSGFNG

SEQ ID NO: 1562 - protein, 6 aa, synthetic construct
NVLDGL

SEQ ID NO: 1563 - protein, 10 aa, synthetic construct
AVYTGGFKTI

SEQ ID NO: 1564 - protein, 108 aa, synthetic construct
QNIDQPTEMTATEGAIVQINCTYQTSGFNGLFWYQQHAGEAPTFLSYNVLDGLEEKGRFSSFLSRSKGYSYLLLKELQMKDSASYLCAVYTGGFKTIFGAGTRLFVKA

SEQ ID NO: 1565 - protein, 109 aa, synthetic construct
GQNIDQPTEMTATEGAIVQINCTYQTSGFNGLFWYQQHAGEAPTFLSYNVLDGLEEKGRFSSFLSRSKGYSYLLLKELQMKDSASYLCAVYTGGFKTIFGAGTRLFVKA

SEQ ID NO: 1566 - protein, 126 aa, synthetic construct
  VARIANT 2: note = X can be any Amino Acid
MXGVFLLYVSMKMGGTTGQNIDQPTEMTATEGAIVQINCTYQTSGFNGLFWYQQHAGEAPTFLSYNVLDGLEEKGRFSSFLSRSKGYSYLLLKELQMKDSASYLCAVYTGGFKTIFGAGTRLFVKA

SEQ ID NO: 1567 - protein, 126 aa, synthetic construct; identical to SEQ ID NO: 1566
  VARIANT 2: note = X can be any Amino Acid

SEQ ID NO: 1568 - protein, 263 aa, synthetic construct
MWGVFLLYVSMKMGGTTGQNIDQPTEMTATEGAIVQINCTYQTSGFNGLFWYQQHAGEAPTFLSYNVLDGLEEKGRFSSFLSRSKGYSYLLLKELQMKDSASYLCAVYTGGFKTIFGAGTRLFVKANIQNPEPAVYQLKDPRSQDSTLCLFTDFDSQINVPKTMESGTFITDKCVLDMKAMDSKSNGAIAWSNQTSFTCQDIFKETNATYPSSDVPCDATLTEKSFETDMNLNFQNLLVIVLRILLLKVAGFNLLMTLRLWSS

SEQ ID NO: 1569 - protein, 263 aa, synthetic construct
MAGVFLLYVSMKMGGTTGQNIDQPTEMTATEGAIVQINCTYQTSGFNGLFWYQQHAGEAPTFLSYNVLDGLEEKGRFSSFLSRSKGYSYLLLKELQMKDSASYLCAVYTGGFKTIFGAGTRLFVKANIQNPEPAVYQLKDPRSQDSTLCLFTDFDSQINVPKTMESGTFITDKCVLDMKAMDSKSNGAIAWSNQTSFTCQDIFKETNATYPSSDVPCDATLTEKSFETDMNLNFQNLLVIVLRILLLKVAGFNLLMTLRLWSS

SEQ ID NO: 1570 - protein, 263 aa, synthetic construct
MHGVFLLYVSMKMGGTTGQNIDQPTEMTATEGAIVQINCTYQTSGFNGLFWYQQHAGEAPTFLSYNVLDGLEEKGRFSSFLSRSKGYSYLLLKELQMKDSASYLCAVYTGGFKTIFGAGTRLFVKANIQNPEPAVYQLKDPRSQDSTLCLFTDFDSQINVPKTMESGTFITDKCVLDMKAMDSKSNGAIAWSNQTSFTCQDIFKETNATYPSSDVPCDATLTEKSFETDMNLNFQNLLVIVLRILLLKVAGFNLLMTLRLWSS

SEQ ID NO: 1571 - protein, 6 aa, synthetic construct
NSASQS

SEQ ID NO: 1572 - protein, 6 aa, synthetic construct
VYSSGN

SEQ ID NO: 1573 - protein, 13 aa, synthetic construct
AVNPKYTGGFKTI

SEQ ID NO: 1574 - protein, 113 aa, synthetic construct
QRKEVEQDPGPFNVPEGATVAFNCTYSNSASQSFFWYRQDCRKEPKLLMSVYSSGNEDGRFTAHLNRASQYISLLIRDSKLSDSATYLCAVNPKYTGGFKTIFGAGTRLFVKA

SEQ ID NO: 1575 - protein, 112 aa, synthetic construct
RKEVEQDPGPFNVPEGATVAFNCTYSNSASQSFFWYRQDCRKEPKLLMSVYSSGNEDGRFTAHLNRASQYISLLIRDSKLSDSATYLCAVNPKYTGGFKTIFGAGTRLFVKA

SEQ ID NO: 1576 - protein, 133 aa, synthetic construct
  VARIANT 2: note = X can be any Amino Acid
MXSLRVLLVILWLQLSWVWSQRKEVEQDPGPFNVPEGATVAFNCTYSNSASQSFFWYRQDCRKEPKLLMSVYSSGNEDGRFTAHLNRASQYISLLIRDSKLSDSATYLCAVNPKYTGGFKTIFGAGTRLFVKA

SEQ ID NO: 1577 - protein, 133 aa, synthetic construct; identical to SEQ ID NO: 1576

SEQ ID NO: 1578 - protein, 270 aa, synthetic construct
MISLRVLLVILWLQLSWVWSQRKEVEQDPGPFNVPEGATVAFNCTYSNSASQSFFWYRQDCRKEPKLLMSVYSSGNEDGRFTAHLNRASQYISLLIRDSKLSDSATYLCAVNPKYTGGFKTIFGAGTRLFVKANIQNPEPAVYQLKDPRSQDSTLCLFTDFDSQINVPKTMESGTFITDKCVLDMKAMDSKSNGAIAWSNQTSFTCQDIFKETNATYPSSDVPCDATLTEKSFETDMNLNFQNLLVIVLRILLLKVAGFNLLMTLRLWSS

SEQ ID NO: 1579 - protein, 270 aa, synthetic construct
MASLRVLLVILWLQLSWVWSQRKEVEQDPGPFNVPEGATVAFNCTYSNSASQSFFWYRQDCRKEPKLLMSVYSSGNEDGRFTAHLNRASQYISLLIRDSKLSDSATYLCAVNPKYTGGFKTIFGAGTRLFVKANIQNPEPAVYQLKDPRSQDSTLCLFTDFDSQINVPKTMESGTFITDKCVLDMKAMDSKSNGAIAWSNQTSFTCQDIFKETNATYPSSDVPCDATLTEKSFETDMNLNFQNLLVIVLRILLLKVAGFNLLMTLRLWSS

SEQ ID NO: 1580 - protein, 270 aa, synthetic construct
MHSLRVLLVILWLQLSWVWSQRKEVEQDPGPFNVPEGATVAFNCTYSNSASQSFFWYRQDCRKEPKLLMSVYSSGNEDGRFTAHLNRASQYISLLIRDSKLSDSATYLCAVNPKYTGGFKTIFGAGTRLFVKANIQNPEPAVYQLKDPRSQDSTLCLFTDFDSQINVPKTMESGTFITDKCVLDMKAMDSKSNGAIAWSNQTSFTCQDIFKETNATYPSSDVPCDATLTEKSFETDMNLNFQNLLVIVLRILLLKVAGFNLLMTLRLWSS

SEQ ID NO: 1581 - protein, 6 aa, synthetic construct
NSASQS

SEQ ID NO: 1582 - protein, 6 aa, synthetic construct
VYSSGN

SEQ ID NO: 1583 - protein, 12 aa, synthetic construct
VVDDQTGANNLF

SEQ ID NO: 1584 - protein, 112 aa, synthetic construct
QRKEVEQDPGPFNVPEGATVAFNCTYSNSASQSFFWYRQDCRKEPKLLMSVYSSGNEDGRFTAQLNRASQYISLLIRDSKLSDSATYLCVVDDQTGANNLFFGTGTRLTVIP

SEQ ID NO: 1585 - protein, 111 aa, synthetic construct
RKEVEQDPGPFNVPEGATVAFNCTYSNSASQSFFWYRQDCRKEPKLLMSVYSSGNEDGRFTAQLNRASQYISLLIRDSKLSDSATYLCVVDDQTGANNLFFGTGTRLTVIP

SEQ ID NO: 1586 - protein, 132 aa, synthetic construct
  VARIANT 2: note = X can be any Amino Acid
MXSLRVLLVILWLQLSWVWSQRKEVEQDPGPFNVPEGATVAFNCTYSNSASQSFFWYRQDCRKEPKLLMSVYSSGNEDGRFTAQLNRASQYISLLIRDSKLSDSATYLCVVDDQTGANNLFFGTGTRLTVIP

SEQ ID NO: 1587 - protein, 132 aa, synthetic construct; identical to SEQ ID NO: 1586
  VARIANT 2: note = X can be any Amino Acid

SEQ ID NO: 1588 - protein, 269 aa, synthetic construct
MISLRVLLVILWLQLSWVWSQRKEVEQDPGPFNVPEGATVAFNCTYSNSASQSFFWYRQDCRKEPKLLMSVYSSGNEDGRFTAQLNRASQYISLLIRDSKLSDSATYLCVVDDQTGANNLFFGTGTRLTVIPNIQNPEPAVYQLKDPRSQDSTLCLFTDFDSQINVPKTMESGTFITDKCVLDMKAMDSKSNGAIAWSNQTSFTCQDIFKETNATYPSSDVPCDATLTEKSFETDMNLNFQNLLVIVLRILLLKVAGFNLLMTLRLWSS

SEQ ID NO: 1589 - protein, 269 aa, synthetic construct
MASLRVLLVILWLQLSWVWSQRKEVEQDPGPFNVPEGATVAFNCTYSNSASQSFFWYRQDCRKEPKLLMSVYSSGNEDGRFTAQLNRASQYISLLIRDSKLSDSATYLCVVDDQTGANNLFFGTGTRLTVIPNIQNPEPAVYQLKDPRSQDSTLCLFTDFDSQINVPKTMESGTFITDKCVLDMKAMDSKSNGAIAWSNQTSFTCQDIFKETNATYPSSDVPCDATLTEKSFETDMNLNFQNLLVIVLRILLLKVAGFNLLMTLRLWSS

SEQ ID NO: 1590 - protein, 269 aa, synthetic construct
MHSLRVLLVILWLQLSWVWSQRKEVEQDPGPFNVPEGATVAFNCTYSNSASQSFFWYRQDCRKEPKLLMSVYSSGNEDGRFTAQLNRASQYISLLIRDSKLSDSATYLCVVDDQTGANNLFFGTGTRLTVIPNIQNPEPAVYQLKDPRSQDSTLCLFTDFDSQINVPKTMESGTFITDKCVLDMKAMDSKSNGAIAWSNQTSFTCQDIFKETNATYPSSDVPCDATLTEKSFETDMNLNFQNLLVIVLRILLLKVAGFNLLMTLRLWSS

SEQ ID NO: 1591 - protein, 5 aa, synthetic construct
TSINN

SEQ ID NO: 1592 - protein, 7 aa, synthetic construct
IRSNERE

SEQ ID NO: 1593 - protein, 12 aa, synthetic construct
ATDGETSGSRLT

SEQ ID NO: 1594 - protein, 111 aa, synthetic construct
QQGEEDPQALSIQEGENATMNCSYKTSINNLQWYRQNSGRGLVHLILIRSNEREKHSGRLRVTLDTSKKSSSLLITASRAADTASYFCATDGETSGSRLTFGEGTQLTVNP

SEQ ID NO: 1595 - protein, 112 aa, synthetic construct
SQQGEEDPQALSIQEGENATMNCSYKTSINNLQWYRQNSGRGLVHLILIRSNEREKHSGRLRVTLDTSKKSSSLLITASRAADTASYFCATDGETSGSRLTFGEGTQLTVNP

SEQ ID NO: 1596 - protein, 131 aa, synthetic construct
  VARIANT 2: note = X can be any Amino Acid
MXTLLGVSLVILWLQLAVNSQQGEEDPQALSIQEGENATMNCSYKTSINNLQWYRQNSGRGLVHLILIRSNEREKHSGRLRVTLDTSKKSSSLLITASRAADTASYFCATDGETSGSRLTFGEGTQLTVNP

SEQ ID NO: 1597 - protein, 131 aa, synthetic construct; identical to SEQ ID NO: 1596
  VARIANT 2: note = X can be any Amino Acid

SEQ ID NO: 1598 - protein, 268 aa, synthetic construct
METLLGVSLVILWLQLAVNSQQGEEDPQALSIQEGENATMNCSYKTSINNLQWYRQNSGRGLVHLILIRSNEREKHSGRLRVTLDTSKKSSSLLITASRAADTASYFCATDGETSGSRLTFGEGTQLTVNPNIQNPEPAVYQLKDPRSQDSTLCLFTDFDSQINVPKTMESGTFITDKCVLDMKAMDSKSNGAIAWSNQTSFTCQDIFKETNATYPSSDVPCDATLTEKSFETDMNLNFQNLLVIVLRILLLKVAGFNLLMTLRLWSS

SEQ ID NO: 1599 - protein, 268 aa, synthetic construct
MATLLGVSLVILWLQLAVNSQQGEEDPQALSIQEGENATMNCSYKTSINNLQWYRQNSGRGLVHLILIRSNEREKHSGRLRVTLDTSKKSSSLLITASRAADTASYFCATDGETSGSRLTFGEGTQLTVNPNIQNPEPAVYQLKDPRSQDSTLCLFTDFDSQINVPKTMESGTFITDKCVLDMKAMDSKSNGAIAWSNQTSFTCQDIFKETNATYPSSDVPCDATLTEKSFETDMNLNFQNLLVIVLRILLLKVAGFNLLMTLRLWSS

SEQ ID NO: 1600 - protein, 268 aa, synthetic construct
MHTLLGVSLVILWLQLAVNSQQGEEDPQALSIQEGENATMNCSYKTSINNLQWYRQNSGRGLVHLILIRSNEREKHSGRLRVTLDTSKKSSSLLITASRAADTASYFCATDGETSGSRLTFGEGTQLTVNPNIQNPEPAVYQLKDPRSQDSTLCLFTDFDSQINVPKTMESGTFITDKCVLDMKAMDSKSNGAIAWSNQTSFTCQDIFKETNATYPSSDVPCDATLTEKSFETDMNLNFQNLLVIVLRILLLKVAGFNLLMTLRLWSS

SEQ ID NO: 1601 - protein, 6 aa, synthetic construct
SSNFYA

SEQ ID NO: 1602 - protein, 7 aa, synthetic construct
MTLNGDE

SEQ ID NO: 1603 - protein, 9 aa, synthetic construct
AFTTGNQFY

SEQ ID NO: 1604 - protein, 110 aa, synthetic construct
ILNVEQSPQSLHVQEGDSTNFTCSFPSSNFYALHWYRWETAKSPEALFVMTLNGDEKKKGRISATLNTKEGYSYLYIKGSQPEDSATYLCAFTTGNQFYFGTGTSLTVIP

SEQ ID NO: 1605 - protein, 110 aa, synthetic construct; identical to SEQ ID NO: 1604

SEQ ID NO: 1606 - protein, 132 aa, synthetic construct
  VARIANT 2: note = X can be any Amino Acid
MXKNPLAAPLLILWFHLDCVSSILNVEQSPQSLHVQEGDSTNFTCSFPSSNFYALHWYRWETAKSPEALFVMTLNGDEKKKGRISATLNTKEGYSYLYIKGSQPEDSATYLCAFTTGNQFYFGTGTSLTVIP

SEQ ID NO: 1607 - protein, 132 aa, synthetic construct; identical to SEQ ID NO: 1606
  VARIANT 2: note = X can be any Amino Acid

SEQ ID NO: 1608 - protein, 269 aa, synthetic construct
MEKNPLAAPLLILWFHLDCVSSILNVEQSPQSLHVQEGDSTNFTCSFPSSNFYALHWYRWETAKSPEALFVMTLNGDEKKKGRISATLNTKEGYSYLYIKGSQPEDSATYLCAFTTGNQFYFGTGTSLTVIPNIQNPEPAVYQLKDPRSQDSTLCLFTDFDSQINVPKTMESGTFITDKCVLDMKAMDSKSNGAIAWSNQTSFTCQDIFKETNATYPSSDVPCDATLTEKSFETDMNLNFQNLLVIVLRILLLKVAGFNLLMTLRLWSS

SEQ ID NO: 1609 - protein, 269 aa, synthetic construct
MAKNPLAAPLLILWFHLDCVSSILNVEQSPQSLHVQEGDSTNFTCSFPSSNFYALHWYRWETAKSPEALFVMTLNGDEKKKGRISATLNTKEGYSYLYIKGSQPEDSATYLCAFTTGNQFYFGTGTSLTVIPNIQNPEPAVYQLKDPRSQDSTLCLFTDFDSQINVPKTMESGTFITDKCVLDMKAMDSKSNGAIAWSNQTSFTCQDIFKETNATYPSSDVPCDATLTEKSFETDMNLNFQNLLVIVLRILLLKVAGFNLLMTLRLWSS

SEQ ID NO: 1610 - protein, 269 aa, synthetic construct
MHKNPLAAPLLILWFHLDCVSSILNVEQSPQSLHVQEGDSTNFTCSFPSSNFYALHWYRWETAKSPEALFVMTLNGDEKKKGRISATLNTKEGYSYLYIKGSQPEDSATYLCAFTTGNQFYFGTGTSLTVIPNIQNPEPAVYQLKDPRSQDSTLCLFTDFDSQINVPKTMESGTFITDKCVLDMKAMDSKSNGAIAWSNQTSFTCQDIFKETNATYPSSDVPCDATLTEKSFETDMNLNFQNLLVIVLRILLLKVAGFNLLMTLRLWSS

SEQ ID NO: 1611 - protein, 7 aa, synthetic construct
NIATNDY

SEQ ID NO: 1612 - protein, 5 aa, synthetic construct
GYKTK

SEQ ID NO: 1613 - protein, 13 aa, synthetic construct
LVGDMDQAGTALI

SEQ ID NO: 1614 - protein, 110 aa, synthetic construct
KTTQPISMDSYEGQEVNITCSHNNIATNDYITWYQQFPSQGPRFIIQGYKTKVTNEVASLFIPADRKSSTLSLPRVSLSDTAVYYCLVGDMDQAGTALIFGKGTTLSVSS

SEQ ID NO: 1615 - protein, 112 aa, synthetic construct
LAKTTQPISMDSYEGQEVNITCSHNNIATNDYITWYQQFPSQGPRFIIQGYKTKVTNEVASLFIPADRKSSTLSLPRVSLSDTAVYYCLVGDMDQAGTALIFGKGTTLSVSS

SEQ ID NO: 1616 - protein, 129 aa, synthetic construct
  VARIANT 2: note = X can be any Amino Acid
MXQVARVIVFLTLSTLSLAKTTQPISMDSYEGQEVNITCSHNNIATNDYITWYQQFPSQGPRFIIQGYKTKVTNEVASLFIPADRKSSTLSLPRVSLSDTAVYYCLVGDMDQAGTALIFGKGTTLSVSS

SEQ ID NO: 1617 - protein, 129 aa, synthetic construct; identical to SEQ ID NO: 1616
  VARIANT 2: note = X can be any Amino Acid

SEQ ID NO: 1618 - protein, 266 aa, synthetic construct
MRQVARVIVFLTLSTLSLAKTTQPISMDSYEGQEVNITCSHNNIATNDYITWYQQFPSQGPRFIIQGYKTKVTNEVASLFIPADRKSSTLSLPRVSLSDTAVYYCLVGDMDQAGTALIFGKGTTLSVSSNIQNPEPAVYQLKDPRSQDSTLCLFTDFDSQINVPKTMESGTFITDKCVLDMKAMDSKSNGAIAWSNQTSFTCQDIFKETNATYPSSDVPCDATLTEKSFETDMNLNFQNLLVIVLRILLLKVAGFNLLMTLRLWSS

SEQ ID NO: 1619 - protein, 266 aa, synthetic construct
MAQVARVIVFLTLSTLSLAKTTQPISMDSYEGQEVNITCSHNNIATNDYITWYQQFPSQGPRFIIQGYKTKVTNEVASLFIPADRKSSTLSLPRVSLSDTAVYYCLVGDMDQAGTALIFGKGTTLSVSSNIQNPEPAVYQLKDPRSQDSTLCLFTDFDSQINVPKTMESGTFITDKCVLDMKAMDSKSNGAIAWSNQTSFTCQDIFKETNATYPSSDVPCDATLTEKSFETDMNLNFQNLLVIVLRILLLKVAGFNLLMTLRLWSS

SEQ ID NO: 1620 - protein, 266 aa, synthetic construct
MHQVARVIVFLTLSTLSLAKTTQPISMDSYEGQEVNITCSHNNIATNDYITWYQQFPSQGPRFIIQGYKTKVTNEVASLFIPADRKSSTLSLPRVSLSDTAVYYCLVGDMDQAGTALIFGKGTTLSVSSNIQNPEPAVYQLKDPRSQDSTLCLFTDFDSQINVPKTMESGTFITDKCVLDMKAMDSKSNGAIAWSNQTSFTCQDIFKETNATYPSSDVPCDATLTEKSFETDMNLNFQNLLVIVLRILLLKVAGFNLLMTLRLWSS

SEQ ID NO: 1621 - protein, 7 aa, synthetic construct
NIATNDY

SEQ ID NO: 1622 - protein, 5 aa, synthetic construct
GYKTK

SEQ ID NO: 1623 - protein, 13 aa, synthetic construct
LVGDMDQAGTALI

SEQ ID NO: 1624 - protein, 110 aa, synthetic construct; identical to SEQ ID NO: 1614

SEQ ID NO: 1625 - protein, 112 aa, synthetic construct; identical to SEQ ID NO: 1615

SEQ ID NO: 1626 - protein, 129 aa, synthetic construct; identical to SEQ ID NO: 1616
  VARIANT 2: note = X can be any Amino Acid

SEQ ID NO: 1627 - protein, 129 aa, synthetic construct; identical to SEQ ID NO: 1616
  VARIANT 2: note = X can be any Amino Acid

SEQ ID NO: 1628 - protein, 266 aa, synthetic construct; identical to SEQ ID NO: 1618

SEQ ID NO: 1629 - protein, 266 aa, synthetic construct; identical to SEQ ID NO: 1619

SEQ ID NO: 1630 - protein, 266 aa, synthetic construct; identical to SEQ ID NO: 1620

SEQ ID NO: 1631 - protein, 7 aa, synthetic construct
NIATNDY

SEQ ID NO: 1632 - protein, 5 aa, synthetic construct
GYKTK

SEQ ID NO: 1633 - protein, 13 aa, synthetic construct
LVGDRDQAGTALI

SEQ ID NO: 1634 - protein, 110 aa, synthetic construct
KTTQPISMDSYEGQEVNITCSHNNIATNDYITWYQQFPSQGPRFIIQGYKTKVTNEVASLFIPADRKSSTLSLPRVSLSDTAVYYCLVGDRDQAGTALIFGKGTTLSVSS

SEQ ID NO: 1635 - protein, 112 aa, synthetic construct
LAKTTQPISMDSYEGQEVNITCSHNNIATNDYITWYQQFPSQGPRFIIQGYKTKVTNEVASLFIPADRKSSTLSLPRVSLSDTAVYYCLVGDRDQAGTALIFGKGTTLSVSS

SEQ ID NO: 1636 - protein, 129 aa, synthetic construct
  VARIANT 2: note = X can be any Amino Acid
MXQVARVIVFLTLSTLSLAKTTQPISMDSYEGQEVNITCSHNNIATNDYITWYQQFPSQGPRFIIQGYKTKVTNEVASLFIPADRKSSTLSLPRVSLSDTAVYYCLVGDRDQAGTALIFGKGTTLSVSS

SEQ ID NO: 1637 - protein, 129 aa, synthetic construct; identical to SEQ ID NO: 1636
  VARIANT 2: note = X can be any Amino Acid

SEQ ID NO: 1638 - protein, 266 aa, synthetic construct
MRQVARVIVFLTLSTLSLAKTTQPISMDSYEGQEVNITCSHNNIATNDYITWYQQFPSQGPRFIIQGYKTKVTNEVASLFIPADRKSSTLSLPRVSLSDTAVYYCLVGDRDQAGTALIFGKGTTLSVSSNIQNPEPAVYQLKDPRSQDSTLCLFTDFDSQINVPKTMESGTFITDKCVLDMKAMDSKSNGAIAWSNQTSFTCQDIFKETNATYPSSDVPCDATLTEKSFETDMNLNFQNLLVIVLRILLLKVAGFNLLMTLRLWSS

SEQ ID NO: 1639 - protein, 266 aa, synthetic construct
MAQVARVIVFLTLSTLSLAKTTQPISMDSYEGQEVNITCSHNNIATNDYITWYQQFPSQGPRFIIQGYKTKVTNEVASLFIPADRKSSTLSLPRVSLSDTAVYYCLVGDRDQAGTALIFGKGTTLSVSSNIQNPEPAVYQLKDPRSQDSTLCLFTDFDSQINVPKTMESGTFITDKCVLDMKAMDSKSNGAIAWSNQTSFTCQDIFKETNATYPSSDVPCDATLTEKSFETDMNLNFQNLLVIVLRILLLKVAGFNLLMTLRLWSS

SEQ ID NO: 1640 - protein, 266 aa, synthetic construct
MHQVARVIVFLTLSTLSLAKTTQPISMDSYEGQEVNITCSHNNIATNDYITWYQQFPSQGPRFIIQGYKTKVTNEVASLFIPADRKSSTLSLPRVSLSDTAVYYCLVGDRDQAGTALIFGKGTTLSVSSNIQNPEPAVYQLKDPRSQDSTLCLFTDFDSQINVPKTMESGTFITDKCVLDMKAMDSKSNGAIAWSNQTSFTCQDIFKETNATYPSSDVPCDATLTEKSFETDMNLNFQNLLVIVLRILLLKVAGFNLLMTLRLWSS

SEQ ID NO: 1641 - protein, 7 aa, synthetic construct
NIATNDY

SEQ ID NO: 1642 - protein, 5 aa, synthetic construct
GYKTK

SEQ ID NO: 1643 - protein, 13 aa, synthetic construct
LVGDMDQAGTALI

SEQ ID NO: 1644 - protein, 110 aa, synthetic construct; identical to SEQ ID NO: 1614

SEQ ID NO: 1645 - protein, 112 aa, synthetic construct; identical to SEQ ID NO: 1615

SEQ ID NO: 1646 - protein, 129 aa, synthetic construct; identical to SEQ ID NO: 1616
  VARIANT 2: note = X can be any Amino Acid

SEQ ID NO: 1647 - protein, 129 aa, synthetic construct; identical to SEQ ID NO: 1616
  VARIANT 2: note = X can be any Amino Acid

SEQ ID NO: 1648 - protein, 266 aa, synthetic construct; identical to SEQ ID NO: 1618

SEQ ID NO: 1649 - protein, 266 aa, synthetic construct; identical to SEQ ID NO: 1619

SEQ ID NO: 1650 - protein, 266 aa, synthetic construct; identical to SEQ ID NO: 1620

SEQ ID NO: 1651 - protein, 6 aa, synthetic construct
DRGSQS

SEQ ID NO: 1652 - protein, 6 aa, synthetic construct
IYSNGD

SEQ ID NO: 1653 - protein, 11 aa, synthetic construct
AAAMDSSYKLI

SEQ ID NO: 1654 - protein, 112 aa, synthetic construct
QQKEVEQNSGPLSVPEGAIASLNCTYSDRGSQSFFWYRQYSGKSPELIMFIYSNGDKEDGRFTAQLNKASQYVSLLIRDSQPSDSATYLCAAAMDSSYKLIFGSGTRLLVRP

SEQ ID NO: 1655 - protein, 111 aa, synthetic construct
QKEVEQNSGPLSVPEGAIASLNCTYSDRGSQSFFWYRQYSGKSPELIMFIYSNGDKEDGRFTAQLNKASQYVSLLIRDSQPSDSATYLCAAAMDSSYKLIFGSGTRLLVRP

SEQ ID NO: 1656 - protein, 132 aa, synthetic construct
  VARIANT 2: note = X can be any Amino Acid
MXSLRVLLVILWLQLSWVWSQQKEVEQNSGPLSVPEGAIASLNCTYSDRGSQSFFWYRQYSGKSPELIMFIYSNGDKEDGRFTAQLNKASQYVSLLIRDSQPSDSATYLCAAAMDSSYKLIFGSGTRLLVRP

SEQ ID NO: 1657 - protein, 132 aa, synthetic construct; identical to SEQ ID NO: 1656
  VARIANT 2: note = X can be any Amino Acid

SEQ ID NO: 1658 - protein, 269 aa, synthetic construct
MKSLRVLLVILWLQLSWVWSQQKEVEQNSGPLSVPEGAIASLNCTYSDRGSQSFFWYRQYSGKSPELIMFIYSNGDKEDGRFTAQLNKASQYVSLLIRDSQPSDSATYLCAAAMDSSYKLIFGSGTRLLVRPNIQNPEPAVYQLKDPRSQDSTLCLFTDFDSQINVPKTMESGTFITDKCVLDMKAMDSKSNGAIAWSNQTSFTCQDIFKETNATYPSSDVPCDATLTEKSFETDMNLNFQNLLVIVLRILLLKVAGFNLLMTLRLWSS

SEQ ID NO: 1659 - protein, 269 aa, synthetic construct
MASLRVLLVILWLQLSWVWSQQKEVEQNSGPLSVPEGAIASLNCTYSDRGSQSFFWYRQYSGKSPELIMFIYSNGDKEDGRFTAQLNKASQYVSLLIRDSQPSDSATYLCAAAMDSSYKLIFGSGTRLLVRPNIQNPEPAVYQLKDPRSQDSTLCLFTDFDSQINVPKTMESGTFITDKCVLDMKAMDSKSNGAIAWSNQTSFTCQDIFKETNATYPSSDVPCDATLTEKSFETDMNLNFQNLLVIVLRILLLKVAGFNLLMTLRLWSS

SEQ ID NO: 1660 - protein, 269 aa, synthetic construct
MHSLRVLLVILWLQLSWVWSQQKEVEQNSGPLSVPEGAIASLNCTYSDRGSQSFFWYRQYSGKSPELIMFIYSNGDKEDGRFTAQLNKASQYVSLLIRDSQPSDSATYLCAAAMDSSYKLIFGSGTRLLVRPNIQNPEPAVYQLKDPRSQDSTLCLFTDFDSQINVPKTMESGTFITDKCVLDMKAMDSKSNGAIAWSNQTSFTCQDIFKETNATYPSSDVPCDATLTEKSFETDMNLNFQNLLVIVLRILLLKVAGFNLLMTLRLWSS

SEQ ID NO: 1661 - protein, 7 aa, synthetic construct
TIYSNPF

SEQ ID NO: 1662 - protein, 7 aa, synthetic construct
SFTDNKR

SEQ ID NO: 1663 - protein, 11 aa, synthetic construct
ALRGNAGAKLT

SEQ ID NO: 1664 - protein, 115 aa, synthetic construct
DGDSVTQTEGLVTLTEGLPVMLNCTYQTIYSNPFLFWYVQHLNESPRLLLKSFTDNKRTEHQGFHATLHKSSSSFHLQKSSAQLSDSALYYCALRGNAGAKLTFGGGTRLTVRPD

SEQ ID NO: 1665 - protein, 114 aa, synthetic construct
GDSVTQTEGLVTLTEGLPVMLNCTYQTIYSNPFLFWYVQHLNESPRLLLKSFTDNKRTEHQGFHATLHKSSSSFHLQKSSAQLSDSALYYCALRGNAGAKLTFGGGTRLTVRPD

SEQ ID NO: 1666 - protein, 135 aa, synthetic construct
  VARIANT 2: note = X can be any Amino Acid
MXPVTCSVLVLLLMLRRSNGDGDSVTQTEGLVTLTEGLPVMLNCTYQTIYSNPFLFWYVQHLNESPRLLLKSFTDNKRTEHQGFHATLHKSSSSFHLQKSSAQLSDSALYYCALRGNAGAKLTFGGGTRLTVRPD

SEQ ID NO: 1667 - protein, 135 aa, synthetic construct; identical to SEQ ID NO: 1666
  VARIANT 2: note = X can be any Amino Acid

SEQ ID NO: 1668 - protein, 271 aa, synthetic construct
MRPVTCSVLVLLLMLRRSNGDGDSVTQTEGLVTLTEGLPVMLNCTYQTIYSNPFLFWYVQHLNESPRLLLKSFTDNKRTEHQGFHATLHKSSSSFHLQKSSAQLSDSALYYCALRGNAGAKLTFGGGTRLTVRPDIQNPEPAVYQLKDPRSQDSTLCLFTDFDSQINVPKTMESGTFITDKTVLDMKAMDSKSNGAIAWSNQTSFTCQDIFKETNATYPSSDVPCDATLTEKSFETDMNLNFQNLSVMGLRILLLKVAGFNLLMTLRLWSS

SEQ ID NO: 1669 - protein, 271 aa, synthetic construct
MAPVTCSVLVLLLMLRRSNGDGDSVTQTEGLVTLTEGLPVMLNCTYQTIYSNPFLFWYVQHLNESPRLLLKSFTDNKRTEHQGFHATLHKSSSSFHLQKSSAQLSDSALYYCALRGNAGAKLTFGGGTRLTVRPDIQNPEPAVYQLKDPRSQDSTLCLFTDFDSQINVPKTMESGTFITDKTVLDMKAMDSKSNGAIAWSNQTSFTCQDIFKETNATYPSSDVPCDATLTEKSFETDMNLNFQNLSVMGLRILLLKVAGFNLLMTLRLWSS

SEQ ID NO: 1670 - protein, 271 aa, synthetic construct
MHPVTCSVLVLLLMLRRSNGDGDSVTQTEGLVTLTEGLPVMLNCTYQTIYSNPFLFWYVQHLNESPRLLLKSFTDNKRTEHQGFHATLHKSSSSFHLQKSSAQLSDSALYYCALRGNAGAKLTFGGGTRLTVRPDIQNPEPAVYQLKDPRSQDSTLCLFTDFDSQINVPKTMESGTFITDKTVLDMKAMDSKSNGAIAWSNQTSFTCQDIFKETNATYPSSDVPCDATLTEKSFETDMNLNFQNLSVMGLRILLLKVAGFNLLMTLRLWSS

SEQ ID NO: 1671 - protein, 6 aa, synthetic construct
DPNSYY

SEQ ID NO: 1672 - protein, 7 aa, synthetic construct
VFSSTEI

SEQ ID NO: 1673 - protein, 14 aa, synthetic construct
AVSGGTNSAGNKLT

SEQ ID NO: 1674 - protein, 114 aa, synthetic construct
EQVEQRPPHLSVREGDSAVITCTYTDPNSYYFFWYKQEPGASLQLLMKVFSSTEINEGQGFTVLLNKKDKRLSLNLTAAHPGDSAAYFCAVSGGTNSAGNKLTFGIGTRVLVRP

SEQ ID NO: 1675 - protein, 115 aa, synthetic construct
GEQVEQRPPHLSVREGDSAVITCTYTDPNSYYFFWYKQEPGASLQLLMKVFSSTEINEGQGFTVLLNKKDKRLSLNLTAAHPGDSAAYFCAVSGGTNSAGNKLTFGIGTRVLVRP

SEQ ID NO: 1676 - protein, 136 aa, synthetic construct
  VARIANT 2: note = X can be any Amino Acid
MXTVTGPLFLCFWLQLNCVSRGEQVEQRPPHLSVREGDSAVITCTYTDPNSYYFFWYKQEPGASLQLLMKVFSSTEINEGQGFTVLLNKKDKRLSLNLTAAHPGDSAAYFCAVSGGTNSAGNKLTFGIGTRVLVRP

SEQ ID NO: 1677 - protein, 136 aa, synthetic construct; identical to SEQ ID NO: 1676
  VARIANT 2: note = X can be any Amino Acid

SEQ ID NO: 1678 - protein, 273 aa, synthetic construct
MKTVTGPLFLCFWLQLNCVSRGEQVEQRPPHLSVREGDSAVITCTYTDPNSYYFFWYKQEPGASLQLLMKVFSSTEINEGQGFTVLLNKKDKRLSLNLTAAHPGDSAAYFCAVSGGTNSAGNKLTFGIGTRVLVRPDIQNPEPAVYQLKDPRSQDSTLCLFTDFDSQINVPKTMESGTFITDKTVLDMKAMDSKSNGAIAWSNQTSFTCQDIFKETNATYPSSDVPCDATLTEKSFETDMNLNFQNLSVMGLRILLLKVAGFNLLMTLRLWSS

SEQ ID NO: 1679 - protein, 273 aa, synthetic construct
MATVTGPLFLCFWLQLNCVSRGEQVEQRPPHLSVREGDSAVITCTYTDPNSYYFFWYKQEPGASLQLLMKVFSSTEINEGQGFTVLLNKKDKRLSLNLTAAHPGDSAAYFCAVSGGTNSAGNKLTFGIGTRVLVRPDIQNPEPAVYQLKDPRSQDSTLCLFTDFDSQINVPKTMESGTFITDKTVLDMKAMDSKSNGAIAWSNQTSFTCQDIFKETNATYPSSDVPCDATLTEKSFETDMNLNFQNLSVMGLRILLLKVAGFNLLMTLRLWSS

SEQ ID NO: 1680 - protein, 273 aa, synthetic construct
MHTVTGPLFLCFWLQLNCVSRGEQVEQRPPHLSVREGDSAVITCTYTDPNSYYFFWYKQEPGASLQLLMKVFSSTEINEGQGFTVLLNKKDKRLSLNLTAAHPGDSAAYFCAVSGGTNSAGNKLTFGIGTRVLVRPDIQNPEPAVYQLKDPRSQDSTLCLFTDFDSQINVPKTMESGTFITDKTVLDMKAMDSKSNGAIAWSNQTSFTCQDIFKETNATYPSSDVPCDATLTEKSFETDMNLNFQNLSVMGLRILLLKVAGFNLLMTLRLWSS

SEQ ID NO: 1681 - protein, 6 aa, synthetic construct
NDMFDY

SEQ ID NO: 1682 - protein, 7 aa, synthetic construct
VRSNVDK

SEQ ID NO: 1683 - protein, 13 aa, synthetic construct
AAGDSGGSNYKLT

SEQ ID NO: 1684 - protein, 119 aa, synthetic construct
QQKTGGQQVKQSSPSLTVQEGGILILNCDYENDMFDYFAWYKKYPDNSPTLLISVRSNVDKREDGRFTVFLNKSGKHFSLHITASQPEDTAVYLCAAGDSGGSNYKLTFGKGTLLTVTP

SEQ ID NO: 1685 - protein, 119 aa, synthetic construct; identical to SEQ ID NO: 1684

SEQ ID NO: 1686 - protein, 140 aa, synthetic construct
  VARIANT 2: note = X can be any Amino Acid
MXGFLKALLLVLCLRPEWIKSQQKTGGQQVKQSSPSLTVQEGGILILNCDYENDMFDYFAWYKKYPDNSPTLLISVRSNVDKREDGRFTVFLNKSGKHFSLHITASQPEDTAVYLCAAGDSGGSNYKLTFGKGTLLTVTP

SEQ ID NO: 1687 - protein, 140 aa, synthetic construct; identical to SEQ ID NO: 1686
  VARIANT 2: note = X can be any Amino Acid

SEQ ID NO: 1688 - protein, 277 aa, synthetic construct
MTGFLKALLLVLCLRPEWIKSQQKTGGQQVKQSSPSLTVQEGGILILNCDYENDMFDYFAWYKKYPDNSPTLLISVRSNVDKREDGRFTVFLNKSGKHFSLHITASQPEDTAVYLCAAGDSGGSNYKLTFGKGTLLTVTPNIQNPEPAVYQLKDPRSQDSTLCLFTDFDSQINVPKTMESGTFITDKTVLDMKAMDSKSNGAIAWSNQTSFTCQDIFKETNATYPSSDVPCDATLTEKSFETDMNLNFQNLSVMGLRILLLKVAGFNLLMTLRLWSS

SEQ ID NO: 1689 - protein, 277 aa, synthetic construct
MAGFLKALLLVLCLRPEWIKSQQKTGGQQVKQSSPSLTVQEGGILILNCDYENDMFDYFAWYKKYPDNSPTLLISVRSNVDKREDGRFTVFLNKSGKHFSLHITASQPEDTAVYLCAAGDSGGSNYKLTFGKGTLLTVTPNIQNPEPAVYQLKDPRSQDSTLCLFTDFDSQINVPKTMESGTFITDKTVLDMKAMDSKSNGAIAWSNQTSFTCQDIFKETNATYPSSDVPCDATLTEKSFETDMNLNFQNLSVMGLRILLLKVAGFNLLMTLRLWSS

SEQ ID NO: 1690 - protein, 277 aa, synthetic construct
MHGFLKALLLVLCLRPEWIKSQQKTGGQQVKQSSPSLTVQEGGILILNCDYENDMFDYFAWYKKYPDNSPTLLISVRSNVDKREDGRFTVFLNKSGKHFSLHITASQPEDTAVYLCAAGDSGGSNYKLTFGKGTLLTVTPNIQNPEPAVYQLKDPRSQDSTLCLFTDFDSQINVPKTMESGTFITDKTVLDMKAMDSKSNGAIAWSNQTSFTCQDIFKETNATYPSSDVPCDATLTEKSFETDMNLNFQNLSVMGLRILLLKVAGFNLLMTLRLWSS

SEQ ID NO: 1691 - protein, 5 aa, synthetic construct
TTMRS

SEQ ID NO: 1692 - protein, 5 aa, synthetic construct
LASGT

SEQ ID NO: 1693 - protein, 13 aa, synthetic construct
AADSSNTGYQNFY

SEQ ID NO: 1694 - protein, 111 aa, synthetic construct
DQVEQSPSALSLHEGTDSALRCNFTTTMRSVQWFRQNSRGSLISLFYLASGTKENGRLKSAFDSKERRYSTLHIRDAQLEDSGTYFCAADSSNTGYQNFYFGKGTSLTVIP

SEQ ID NO: 1695 - protein, 112 aa, synthetic construct
GDQVEQSPSALSLHEGTDSALRCNFTTTMRSVQWFRQNSRGSLISLFYLASGTKENGRLKSAFDSKERRYSTLHIRDAQLEDSGTYFCAADSSNTGYQNFYFGKGTSLTVIP

SEQ ID NO: 1696 - protein, 132 aa, synthetic construct
  VARIANT 2: note = X can be any Amino Acid
MXRNLGAVLGILWVQICWVRGDQVEQSPSALSLHEGTDSALRCNFTTTMRSVQWFRQNSRGSLISLFYLASGTKENGRLKSAFDSKERRYSTLHIRDAQLEDSGTYFCAADSSNTGYQNFYFGKGTSLTVIP

SEQ ID NO: 1697 - protein, 132 aa, synthetic construct; identical to SEQ ID NO: 1696
  VARIANT 2: note = X can be any Amino Acid

SEQ ID NO: 1698 - protein, 269 aa, synthetic construct
MQRNLGAVLGILWVQICWVRGDQVEQSPSALSLHEGTDSALRCNFTTTMRSVQWFRQNSRGSLISLFYLASGTKENGRLKSAFDSKERRYSTLHIRDAQLEDSGTYFCAADSSNTGYQNFYFGKGTSLTVIPNIQNPEPAVYQLKDPRSQDSTLCLFTDFDSQINVPKTMESGTFITDKTVLDMKAMDSKSNGAIAWSNQTSFTCQDIFKETNATYPSSDVPCDATLTEKSFETDMNLNFQNLSVMGLRILLLKVAGFNLLMTLRLWSS

SEQ ID NO: 1699 - protein, 269 aa, synthetic construct
MARNLGAVLGILWVQICWVRGDQVEQSPSALSLHEGTDSALRCNFTTTMRSVQWFRQNSRGSLISLFYLASGTKENGRLKSAFDSKERRYSTLHIRDAQLEDSGTYFCAADSSNTGYQNFYFGKGTSLTVIPNIQNPEPAVYQLKDPRSQDSTLCLFTDFDSQINVPKTMESGTFITDKTVLDMKAMDSKSNGAIAWSNQTSFTCQDIFKETNATYPSSDVPCDATLTEKSFETDMNLNFQNLSVMGLRILLLKVAGFNLLMTLRLWSS

SEQ ID NO: 1700 - protein, 269 aa, synthetic construct
MHRNLGAVLGILWVQICWVRGDQVEQSPSALSLHEGTDSALRCNFTTTMRSVQWFRQNSRGSLISLFYLASGTKENGRLKSAFDSKERRYSTLHIRDAQLEDSGTYFCAADSSNTGYQNFYFGKGTSLTVIPNIQNPEPAVYQLKDPRSQDSTLCLFTDFDSQINVPKTMESGTFITDKTVLDMKAMDSKSNGAIAWSNQTSFTCQDIFKETNATYPSSDVPCDATLTEKSFETDMNLNFQNLSVMGLRILLLKVAGFNLLMTLRLWSS

SEQ ID NO: 1701 - protein, 5 aa, synthetic construct
TTMRS

SEQ ID NO: 1702 - protein, 5 aa, synthetic construct
LASGT

SEQ ID NO: 1703 - protein, 13 aa, synthetic construct
  VARIANT 8: note = X can be A,R,N,D,C,Q,E,H,I,L,K,M,F,P,O,S,U,T,Q,Y,V,B,Z or J
AADSSNTXYQNFY

SEQ ID NO: 1704 - protein, 111 aa, synthetic construct
  VARIANT 95: note = X can be A,R,N,D,C,Q,E,H,I,L,K,M,F,P,O,S,U,T,Q,Y,V,B,Z or J
DQVEQSPSALSLHEGTDSALRCNFTTTMRSVQWFRQNSRGSLISLFYLASGTKENGRLKSAFDSKERRYSTLHIRDAQLEDSGTYFCAADSSNTXYQNFYFGKGTSLTVIP

SEQ ID NO: 1705 - protein, 112 aa, synthetic construct
  VARIANT 96: note = X can be A,R,N,D,C,Q,E,H,I,L,K,M,F,P,O,S,U,T,Q,Y,V,B,Z or J
GDQVEQSPSALSLHEGTDSALRCNFTTTMRSVQWFRQNSRGSLISLFYLASGTKENGRLKSAFDSKERRYSTLHIRDAQLEDSGTYFCAADSSNTXYQNFYFGKGTSLTVIP

SEQ ID NO: 1706 - protein, 132 aa, synthetic construct
  VARIANT 2: note = X can be any Amino Acid
  VARIANT 116: note = X can be A,R,N,D,C,Q,E,H,I,L,K,M,F,P,O,S,U,T,Q,Y,V,B,Z or J
MXRNLGAVLGILWVQICWVRGDQVEQSPSALSLHEGTDSALRCNFTTTMRSVQWFRQNSRGSLISLFYLASGTKENGRLKSAFDSKERRYSTLHIRDAQLEDSGTYFCAADSSNTXYQNFYFGKGTSLTVIP

SEQ ID NO: 1707 - protein, 132 aa, synthetic construct; identical to SEQ ID NO: 1706
  VARIANT 116: note = X can be A,R,N,D,C,Q,E,H,I,L,K,M,F,P,O,S,U,T,Q,Y,V,B,Z or J
  VARIANT 2: note = X can be any Amino Acid

SEQ ID NO: 1708 - protein, 269 aa, synthetic construct
  VARIANT 116: note = X can be A,R,N,D,C,Q,E,H,I,L,K,M,F,P,O,S,U,T,Q,Y,V,B,Z or J
MQRNLGAVLGILWVQICWVRGDQVEQSPSALSLHEGTDSALRCNFTTTMRSVQWFRQNSRGSLISLFYLASGTKENGRLKSAFDSKERRYSTLHIRDAQLEDSGTYFCAADSSNTXYQNFYFGKGTSLTVIPNIQNPEPAVYQLKDPRSQDSTLCLFTDFDSQINVPKTMESGTFITDKTVLDMKAMDSKSNGAIAWSNQTSFTCQDIFKETNATYPSSDVPCDATLTEKSFETDMNLNFQNLSVMGLRILLLKVAGFNLLMTLRLWSS

SEQ ID NO: 1709 - protein, 269 aa, synthetic construct
  VARIANT 116: note = X can be A,R,N,D,C,Q,E,H,I,L,K,M,F,P,O,S,U,T,Q,Y,V,B,Z or J
MARNLGAVLGILWVQICWVRGDQVEQSPSALSLHEGTDSALRCNFTTTMRSVQWFRQNSRGSLISLFYLASGTKENGRLKSAFDSKERRYSTLHIRDAQLEDSGTYFCAADSSNTXYQNFYFGKGTSLTVIPNIQNPEPAVYQLKDPRSQDSTLCLFTDFDSQINVPKTMESGTFITDKTVLDMKAMDSKSNGAIAWSNQTSFTCQDIFKETNATYPSSDVPCDATLTEKSFETDMNLNFQNLSVMGLRILLLKVAGFNLLMTLRLWSS

SEQ ID NO: 1710 - protein, 269 aa, synthetic construct
  VARIANT 116: note = X can be A,R,N,D,C,Q,E,H,I,L,K,M,F,P,O,S,U,T,Q,Y,V,B,Z or J
MHRNLGAVLGILWVQICWVRGDQVEQSPSALSLHEGTDSALRCNFTTTMRSVQWFRQNSRGSLISLFYLASGTKENGRLKSAFDSKERRYSTLHIRDAQLEDSGTYFCAADSSNTZYQNFYFGKGTSLTVIPNIQNPEPAVYQLKDPRSQDSTLCLFTDFDSQINVPKTMESGTFITDKTVLDMKAMDSKSNGAIAWSNQTSFTCQDIFKETNATYPSSDVPCDATLTEKSFETDMNLNFQNLSVMGLRILLLKVAGFNLLMTLRLWSS

SEQ ID NO: 1711 - protein, 6 aa, synthetic construct
DRGSQS

SEQ ID NO: 1712 - protein, 6 aa, synthetic construct
IYSNGD

SEQ ID NO: 1713 - protein, 11 aa, synthetic construct
AVEGAGSYQLT

SEQ ID NO: 1714 - protein, 112 aa, synthetic construct
QQKEVEQNSGPLSVPEGAIASLNCTYSDRGSQSFFWYRQYSGKSPELIMFIYSNGDKEDGRFTAQLNKASQYVSLLIRDSQPSDSATYLCAVEGAGSYQLTFGKGTKLSVIP

SEQ ID NO: 1715 - protein, 111 aa, synthetic construct
QKEVEQNSGPLSVPEGAIASLNCTYSDRGSQSFFWYRQYSGKSPELIMFIYSNGDKEDGRFTAQLNKASQYVSLLIRDSQPSDSATYLCAVEGAGSYQLTFGKGTKLSVIP

SEQ ID NO: 1716 - protein, 132 aa, synthetic construct
  VARIANT 2: note = X can be any Amino Acid
MXSLRVLLVILWLQLSWVWSQQKEVEQNSGPLSVPEGAIASLNCTYSDRGSQSFFWYRQYSGKSPELIMFIYSNGDKEDGRFTAQLNKASQYVSLLIRDSQPSDSATYLCAVEGAGSYQLTFGKGTKLSVIP

SEQ ID NO: 1717 - protein, 132 aa, synthetic construct; identical to SEQ ID NO: 1716
  VARIANT 2: note = X can be any Amino Acid

SEQ ID NO: 1718 - protein, 269 aa, synthetic construct
MKSLRVLLVILWLQLSWVWSQQKEVEQNSGPLSVPEGAIASLNCTYSDRGSQSFFWYRQYSGKSPELIMFIYSNGDKEDGRFTAQLNKASQYVSLLIRDSQPSDSATYLCAVEGAGSYQLTFGKGTKLSVIPNIQNPEPAVYQLKDPRSQDSTLCLFTDFDSQINVPKTMESGTFITDKCVLDMKAMDSKSNGAIAWSNQTSFTCQDIFKETNATYPSSDVPCDATLTEKSFETDMNLNFQNLLVIVLRILLLKVAGFNLLMTLRLWSS

SEQ ID NO: 1719 - protein, 269 aa, synthetic construct
MASLRVLLVILWLQLSWVWSQQKEVEQNSGPLSVPEGAIASLNCTYSDRGSQSFFWYRQYSGKSPELIMFIYSNGDKEDGRFTAQLNKASQYVSLLIRDSQPSDSATYLCAVEGAGSYQLTFGKGTKLSVIPNIQNPEPAVYQLKDPRSQDSTLCLFTDFDSQINVPKTMESGTFITDKCVLDMKAMDSKSNGAIAWSNQTSFTCQDIFKETNATYPSSDVPCDATLTEKSFETDMNLNFQNLLVIVLRILLLKVAGFNLLMTLRLWSS

SEQ ID NO: 1720 - protein, 269 aa, synthetic construct
MHSLRVLLVILWLQLSWVWSQQKEVEQNSGPLSVPEGAIASLNCTYSDRGSQSFFWYRQYSGKSPELIMFIYSNGDKEDGRFTAQLNKASQYVSLLIRDSQPSDSATYLCAVEGAGSYQLTFGKGTKLSVIPNIQNPEPAVYQLKDPRSQDSTLCLFTDFDSQINVPKTMESGTFITDKCVLDMKAMDSKSNGAIAWSNQTSFTCQDIFKETNATYPSSDVPCDATLTEKSFETDMNLNFQNLLVIVLRILLLKVAGFNLLMTLRLWSS

SEQ ID NO: 1721 - protein, 6 aa, synthetic construct
NSMFDY

SEQ ID NO: 1722 - protein, 9 aa, synthetic construct
ISISSIKDK

SEQ ID NO: 1723 - protein, 13 aa, synthetic construct
AASGNTGTASKLT

SEQ ID NO: 1724 - protein, 119 aa, synthetic construct
QQKNDDQQVKQNSPSLSVQEGRISILNCDYTNSMFDYFLWYKKYPAEGPTFLISISSIKDKNEDGRFTVFLNKSAKHLSLHIVPSQPGDSAVYFCAASGNTGTASKLTFGTGTRLQVTL

SEQ ID NO: 1725 - protein, 114 aa, synthetic construct
DQQVKQNSPSLSVQEGRISILNCDYTNSMFDYFLWYKKYPAEGPTFLISISSIKDKNEDGRFTVFLNKSAKHLSLHIVPSQPGDSAVYFCAASGNTGTASKLTFGTGTRLQVTL

SEQ ID NO: 1726 - protein, 140 aa, synthetic construct
  VARIANT 2: note = X can be any Amino Acid
MXMLLGASVLILWLQPDWVNSQQKNDDQQVKQNSPSLSVQEGRISILNCDYTNSMFDYFLWYKKYPAEGPTFLISISSIKDKNEDGRFTVFLNKSAKHLSLHIVPSQPGDSAVYFCAASGNTGTASKLTFGTGTRLQVTL

SEQ ID NO: 1727 - protein, 140 aa, synthetic construct; identical to SEQ ID NO: 1726
  VARIANT 2: note = X can be any Amino Acid

SEQ ID NO: 1728 - protein, 277 aa, synthetic construct
MAMLLGASVLILWLQPDWVNSQQKNDDQQVKQNSPSLSVQEGRISILNCDYTNSMFDYFLWYKKYPAEGPTFLISISSIKDKNEDGRFTVFLNKSAKHLSLHIVPSQPGDSAVYFCAASGNTGTASKLTFGTGTRLQVTLNIQNPEPAVYQLKDPRSQDSTLCLFTDFDSQINVPKTMESGTFITDKCVLDMKAMDSKSNGAIAWSNQTSFTCQDIFKETNATYPSSDVPCDATLTEKSFETDMNLNFQNLLVIVLRILLLKVAGFNLLMTLRLWSS

SEQ ID NO: 1729 - protein, 277 aa, synthetic construct
MHMLLGASVLILWLQPDWVNSQQKNDDQQVKQNSPSLSVQEGRISILNCDYTNSMFDYFLWYKKYPAEGPTFLISISSIKDKNEDGRFTVFLNKSAKHLSLHIVPSQPGDSAVYFCAASGNTGTASKLTFGTGTRLQVTLNIQNPEPAVYQLKDPRSQDSTLCLFTDFDSQINVPKTMESGTFITDKCVLDMKAMDSKSNGAIAWSNQTSFTCQDIFKETNATYPSSDVPCDATLTEKSFETDMNLNFQNLLVIVLRILLLKVAGFNLLMTLRLWSS

SEQ ID NO: 1730 - protein, 277 aa, synthetic construct; identical to SEQ ID NO: 1729

SEQ ID NO: 1731 - protein, 7 aa, synthetic construct
TIYSNAF

SEQ ID NO: 1732 - protein, 7 aa, synthetic construct
SSTDNKR

SEQ ID NO: 1733 - protein, 11 aa, synthetic construct
ALSEGGNYKYV

SEQ ID NO: 1734 - protein, 114 aa, synthetic construct
DGDSVTQKEGLVTLTEGLPVMLNCTYQTIYSNAFLFWYVHYLNESPRLLLKSSTDNKRTEHQGFHATLHKSSSSFHLQKSSAQLSDSALYYCALSEGGNYKYVFGAGTRLKVIA

SEQ ID NO: 1735 - protein, 113 aa, synthetic construct
GDSVTQKEGLVTLTEGLPVMLNCTYQTIYSNAFLFWYVHYLNESPRLLLKSSTDNKRTEHQGFHATLHKSSSSFHLQKSSAQLSDSALYYCALSEGGNYKYVFGAGTRLKVIA

SEQ ID NO: 1736 - protein, 134 aa, synthetic construct
  VARIANT 2: note = X can be any Amino Acid
MXPGTCSVLVLLLMLRRSNGDGDSVTQKEGLVTLTEGLPVMLNCTYQTIYSNAFLFWYVHYLNESPRLLLKSSTDNKRTEHQGFHATLHKSSSSFHLQKSSAQLSDSALYYCALSEGGNYKYVFGAGTRLKVIA

SEQ ID NO: 1737 - protein, 134 aa, synthetic construct; identical to SEQ ID NO: 1736
  VARIANT 2: note = X can be any Amino Acid

SEQ ID NO: 1738 - protein, 271 aa, synthetic construct
MRPGTCSVLVLLLMLRRSNGDGDSVTQKEGLVTLTEGLPVMLNCTYQTIYSNAFLFWYVHYLNESPRLLLKSSTDNKRTEHQGFHATLHKSSSSFHLQKSSAQLSDSALYYCALSEGGNYKYVFGAGTRLKVIANIQNPEPAVYQLKDPRSQDSTLCLFTDFDSQINVPKTMESGTFITDKCVLDMKAMDSKSNGAIAWSNQTSFTCQDIFKETNATYPSSDVPCDATLTEKSFETDMNLNFQNLLVIVLRILLLKVAGFNLLMTLRLWSS

SEQ ID NO: 1739 - protein, 271 aa, synthetic construct
MAPGTCSVLVLLLMLRRSNGDGDSVTQKEGLVTLTEGLPVMLNCTYQTIYSNAFLFWYVHYLNESPRLLLKSSTDNKRTEHQGFHATLHKSSSSFHLQKSSAQLSDSALYYCALSEGGNYKYVFGAGTRLKVIANIQNPEPAVYQLKDPRSQDSTLCLFTDFDSQINVPKTMESGTFITDKCVLDMKAMDSKSNGAIAWSNQTSFTCQDIFKETNATYPSSDVPCDATLTEKSFETDMNLNFQNLLVIVLRILLLKVAGFNLLMTLRLWSS

SEQ ID NO: 1740 - protein, 271 aa, synthetic construct
MHPGTCSVLVLLLMLRRSNGDGDSVTQKEGLVTLTEGLPVMLNCTYQTIYSNAFLFWYVHYLNESPRLLLKSSTDNKRTEHQGFHATLHKSSSSFHLQKSSAQLSDSALYYCALSEGGNYKYVFGAGTRLKVIANIQNPEPAVYQLKDPRSQDSTLCLFTDFDSQINVPKTMESGTFITDKCVLDMKAMDSKSNGAIAWSNQTSFTCQDIFKETNATYPSSDVPCDATLTEKSFETDMNLNFQNLLVIVLRILLLKVAGFNLLMTLRLWSS

SEQ ID NO: 1741 - protein, 7 aa, synthetic construct
TSDPSYG

SEQ ID NO: 1742 - protein, 8 aa, synthetic construct
QGSYDQQN

SEQ ID NO: 1743 - protein, 14 aa, synthetic construct
AMRGASQGGSEKLV

SEQ ID NO: 1744 - protein, 116 aa, synthetic construct
QKITQTQPGMFVQEKEAVTLDCTYDTSDPSYGLFWYKQPSSGEMIFLIYQGSYDQQNATEGRYSLNFQKARKSANLVISASQLGDSAMYFCAMRGASQGGSEKLVFGKGTKLTVNP

SEQ ID NO: 1745 - protein, 117 aa, synthetic construct
AQKITQTQPGMFVQEKEAVTLDCTYDTSDPSYGLFWYKQPSSGEMIFLIYQGSYDQQNATEGRYSLNFQKARKSANLVISASQLGDSAMYFCAMRGASQGGSEKLVFGKGTKLTVNP

SEQ ID NO: 1746 - protein, 137 aa, synthetic construct
  VARIANT 2: note = X can be any Amino Acid
MXLSSLLKVVTASLWLGPGIAQKITQTQPGMFVQEKEAVTLDCTYDTSDPSYGLFWYKQPSSGEMIFLIYQGSYDQQNATEGRYSLNFQKARKSANLVISASQLGDSAMYFCAMRGASQGGSEKLVFGKGTKLTVNP

SEQ ID NO: 1747 - protein, 137 aa, synthetic construct; identical to SEQ ID NO: 1746
  VARIANT 2: note = X can be any Amino Acid

SEQ ID NO: 1748 - protein, 274 aa, synthetic construct
MSLSSLLKVVTASLWLGPGIAQKITQTQPGMFVQEKEAVTLDCTYDTSDPSYGLFWYKQPSSGEMIFLIYQGSYDQQNATEGRYSLNFQKARKSANLVISASQLGDSAMYFCAMRGASQGGSEKLVFGKGTKLTVNPNIQNPEPAVYQLKDPRSQDSTLCLFTDFDSQINVPKTMESGTFITDKCVLDMKAMDSKSNGAIAWSNQTSFTCQDIFKETNATYPSSDVPCDATLTEKSFETDMNLNFQNLLVIVLRILLLKVAGFNLLMTLRLWSS

SEQ ID NO: 1749 - protein, 274 aa, synthetic construct
MALSSLLKVVTASLWLGPGIAQKITQTQPGMFVQEKEAVTLDCTYDTSDPSYGLFWYKQPSSGEMIFLIYQGSYDQQNATEGRYSLNFQKARKSANLVISASQLGDSAMYFCAMRGASQGGSEKLVFGKGTKLTVNPNIQNPEPAVYQLKDPRSQDSTLCLFTDFDSQINVPKTMESGTFITDKCVLDMKAMDSKSNGAIAWSNQTSFTCQDIFKETNATYPSSDVPCDATLTEKSFETDMNLNFQNLLVIVLRILLLKVAGFNLLMTLRLWSS

SEQ ID NO: 1750 - protein, 274 aa, synthetic construct
MHLSSLLKVVTASLWLGPGIAQKITQTQPGMFVQEKEAVTLDCTYDTSDPSYGLFWYKQPSSGEMIFLIYQGSYDQQNATEGRYSLNFQKARKSANLVISASQLGDSAMYFCAMRGASQGGSEKLVFGKGTKLTVNPNIQNPEPAVYQLKDPRSQDSTLCLFTDFDSQINVPKTMESGTFITDKCVLDMKAMDSKSNGAIAWSNQTSFTCQDIFKETNATYPSSDVPCDATLTEKSFETDMNLNFQNLLVIVLRILLLKVAGFNLLMTLRLWSS

SEQ ID NO: 1751 - protein, 6 aa, synthetic construct
DSASNY

SEQ ID NO: 1752 - protein, 7 aa, synthetic construct
IRSNVGE

SEQ ID NO: 1753 - protein, 11 aa, synthetic construct
AASTGGGNKLT

SEQ ID NO: 1754 - protein, 111 aa, synthetic construct
ENVEQHPSTLSVQEGDSAVIKCTYSDSASNYFPWYKQELGKGPQLIIDIRSNVGEKKDQRIAVTLNKTAKHFSLHITETQPEDSAVYFCAASTGGGNKLTFGTGTQLKVEL

SEQ ID NO: 1755 - protein, 112 aa, synthetic construct
GENVEQHPSTLSVQEGDSAVIKCTYSDSASNYFPWYKQELGKGPQLIIDIRSNVGEKKDQRIAVTLNKTAKHFSLHITETQPEDSAVYFCAASTGGGNKLTFGTGTQLKVEL

SEQ ID NO: 1756 - protein, 131 aa, synthetic construct
  VARIANT 2: note = X can be any Amino Acid
MXSIRAVFIFLWLQLDLVNGENVEQHPSTLSVQEGDSAVIKCTYSDSASNYFPWYKQELGKGPQLIIDIRSNVGEKKDQRIAVTLNKTAKHFSLHITETQPEDSAVYFCAASTGGGNKLTFGTGTQLKVEL

SEQ ID NO: 1757 - protein, 131 aa, synthetic construct; identical to SEQ ID NO: 1756
  VARIANT 2: note = X can be any Amino Acid

SEQ ID NO: 1758 - protein, 268 aa, synthetic construct
MTSIRAVFIFLWLQLDLVNGENVEQHPSTLSVQEGDSAVIKCTYSDSASNYFPWYKQELGKGPQLIIDIRSNVGEKKDQRIAVTLNKTAKHFSLHITETQPEDSAVYFCAASTGGGNKLTFGTGTQLKVELNIQNPEPAVYQLKDPRSQDSTLCLFTDFDSQINVPKTMESGTFITDKCVLDMKAMDSKSNGAIAWSNQTSFTCQDIFKETNATYPSSDVPCDATLTEKSFETDMNLNFQNLLVIVLRILLLKVAGFNLLMTLRLWSS

SEQ ID NO: 1759 - protein, 268 aa, synthetic construct
MASIRAVFIFLWLQLDLVNGENVEQHPSTLSVQEGDSAVIKCTYSDSASNYFPWYKQELGKGPQLIIDIRSNVGEKKDQRIAVTLNKTAKHFSLHITETQPEDSAVYFCAASTGGGNKLTFGTGTQLKVELNIQNPEPAVYQLKDPRSQDSTLCLFTDFDSQINVPKTMESGTFITDKCVLDMKAMDSKSNGAIAWSNQTSFTCQDIFKETNATYPSSDVPCDATLTEKSFETDMNLNFQNLLVIVLRILLLKVAGFNLLMTLRLWSS

SEQ ID NO: 1760 - protein, 268 aa, synthetic construct
MHSIRAVFIFLWLQLDLVNGENVEQHPSTLSVQEGDSAVIKCTYSDSASNYFPWYKQELGKGPQLIIDIRSNVGEKKDQRIAVTLNKTAKHFSLHITETQPEDSAVYFCAASTGGGNKLTFGTGTQLKVELNIQNPEPAVYQLKDPRSQDSTLCLFTDFDSQINVPKTMESGTFITDKCVLDMKAMDSKSNGAIAWSNQTSFTCQDIFKETNATYPSSDVPCDATLTEKSFETDMNLNFQNLLVIVLRILLLKVAGFNLLMTLRLWSS

SEQ ID NO: 1761 - protein, 6 aa, synthetic construct
SSVPPY

SEQ ID NO: 1762 - protein, 8 aa, synthetic construct
YTSAATLV

SEQ ID NO: 1763 - protein, 11 aa, synthetic construct
AVSEDSNYQLI

SEQ ID NO: 1764 - protein, 112 aa, synthetic construct
QSVTQLGSHVSVSEGALVLLRCNYSSSVPPYLFWYVQYPNQGLQLLLKYTSAATLVKGINGFEAEFKKSETSFHLTKPSAHMSDAAEYFCAVSEDSNYQLIWGAGTKLIIKP

SEQ ID NO: 1765 - protein, 113 aa, synthetic construct
AQSVTQLGSHVSVSEGALVLLRCNYSSSVPPYLFWYVQYPNQGLQLLLKYTSAATLVKGINGFEAEFKKSETSFHLTKPSAHMSDAAEYFCAVSEDSNYQLIWGAGTKLIIKP

SEQ ID NO: 1766 - protein, 132 aa, synthetic construct
  VARIANT 2: note = X can be any Amino Acid
MXLLLVPVLEVIFTLGGTRAQSVTQLGSHVSVSEGALVLLRCNYSSSVPPYLFWYVQYPNQGLQLLLKYTSAATLVKGINGFEAEFKKSETSFHLTKPSAHMSDAAEYFCAVSEDSNYQLIWGAGTKLIIKP

SEQ ID NO: 1767 - protein, 132 aa, synthetic construct; identical to SEQ ID NO: 1766
  VARIANT 2: note = X can be any Amino Acid

SEQ ID NO: 1768 - protein, 269 aa, synthetic construct
MLLLLVPVLEVIFTLGGTRAQSVTQLGSHVSVSEGALVLLRCNYSSSVPPYLFWYVQYPNQGLQLLLKYTSAATLVKGINGFEAEFKKSETSFHLTKPSAHMSDAAEYFCAVSEDSNYQLIWGAGTKLIIKPNIQNPEPAVYQLKDPRSQDSTLCLFTDFDSQINVPKTMESGTFITDKCVLDMKAMDSKSNGAIAWSNQTSFTCQDIFKETNATYPSSDVPCDATLTEKSFETDMNLNFQNLLVIVLRILLLKVAGFNLLMTLRLWSS

SEQ ID NO: 1769 - protein, 269 aa, synthetic construct
MALLLVPVLEVIFTLGGTRAQSVTQLGSHVSVSEGALVLLRCNYSSSVPPYLFWYVQYPNQGLQLLLKYTSAATLVKGINGFEAEFKKSETSFHLTKPSAHMSDAAEYFCAVSEDSNYQLIWGAGTKLIIKPNIQNPEPAVYQLKDPRSQDSTLCLFTDFDSQINVPKTMESGTFITDKCVLDMKAMDSKSNGAIAWSNQTSFTCQDIFKETNATYPSSDVPCDATLTEKSFETDMNLNFQNLLVIVLRILLLKVAGFNLLMTLRLWSS

SEQ ID NO: 1770 - protein, 269 aa, synthetic construct
MHLLLVPVLEVIFTLGGTRAQSVTQLGSHVSVSEGALVLLRCNYSSSVPPYLFWYVQYPNQGLQLLLKYTSAATLVKGINGFEAEFKKSETSFHLTKPSAHMSDAAEYFCAVSEDSNYQLIWGAGTKLIIKPNIQNPEPAVYQLKDPRSQDSTLCLFTDFDSQINVPKTMESGTFITDKCVLDMKAMDSKSNGAIAWSNQTSFTCQDIFKETNATYPSSDVPCDATLTEKSFETDMNLNFQNLLVIVLRILLLKVAGFNLLMTLRLWSS

SEQ ID NO: 1771 - protein, 6 aa, synthetic construct
NTAFDY

SEQ ID NO: 1772 - protein, 7 aa, synthetic construct
IRPDVSE

SEQ ID NO: 1773 - protein, 16 aa, synthetic construct
AAEAGNHRGSTLGRLY

SEQ ID NO: 1774 - protein, 124 aa, synthetic construct
QQKEKSDQQQVKQSPQSLIVQKGGISIINCAYENTAFDYFPWYQQFPGKGPALLIAIRPDVSEKKEGRFTISFNKSAKQFSLHIMDSQPGDSATYFCAAEAGNHRGSTLGRLYFGRGTQLTVWP

SEQ ID NO: 1775 - protein, 117 aa, synthetic construct
QQQVKQSPQSLIVQKGGISIINCAYENTAFDYFPWYQQFPGKGPALLIAIRPDVSEKKEGRFTISFNKSAKQFSLHIMDSQPGDSATYFCAAEAGNHRGSTLGRLYFGRGTQLTVWP

SEQ ID NO: 1776 - protein, 145 aa, synthetic construct
  VARIANT 2: note = X can be any Amino Acid
MXKILGASFLVLWLQLCWVSGQQKEKSDQQQVKQSPQSLIVQKGGISIINCAYENTAFDYFPWYQQFPGKGPALLIAIRPDVSEKKEGRFTISFNKSAKQFSLHIMDSQPGDSATYFCAAEAGNHRGSTLGRLYFGRGTQLTVWP

SEQ ID NO: 1777 - protein, 145 aa, synthetic construct; identical to SEQ ID NO: 1776
  VARIANT 2: note = X can be any Amino Acid

SEQ ID NO: 1778 - protein, 282 aa, synthetic construct
MDKILGASFLVLWLQLCWVSGQQKEKSDQQQVKQSPQSLIVQKGGISIINCAYENTAFDYFPWYQQFPGKGPALLIAIRPDVSEKKEGRFTISFNKSAKQFSLHIMDSQPGDSATYFCAAEAGNHRGSTLGRLYFGRGTQLTVWPNIQNPEPAVYQLKDPRSQDSTLCLFTDFDSQINVPKTMESGTFITDKCVLDMKAMDSKSNGAIAWSNQTSFTCQDIFKETNATYPSSDVPCDATLTEKSFETDMNLNFQNLLVIVLRILLLKVAGFNLLMTLRLWSS

SEQ ID NO: 1779 - protein, 282 aa, synthetic construct
MAKILGASFLVLWLQLCWVSGQQKEKSDQQQVKQSPQSLIVQKGGISIINCAYENTAFDYFPWYQQFPGKGPALLIAIRPDVSEKKEGRFTISFNKSAKQFSLHIMDSQPGDSATYFCAAEAGNHRGSTLGRLYFGRGTQLTVWPNIQNPEPAVYQLKDPRSQDSTLCLFTDFDSQINVPKTMESGTFITDKCVLDMKAMDSKSNGAIAWSNQTSFTCQDIFKETNATYPSSDVPCDATLTEKSFETDMNLNFQNLLVIVLRILLLKVAGFNLLMTLRLWSS

SEQ ID NO: 1780 - protein, 282 aa, synthetic construct
MHKILGASFLVLWLQLCWVSGQQKEKSDQQQVKQSPQSLIVQKGGISIINCAYENTAFDYFPWYQQFPGKGPALLIAIRPDVSEKKEGRFTISFNKSAKQFSLHIMDSQPGDSATYFCAAEAGNHRGSTLGRLYFGRGTQLTVWPNIQNPEPAVYQLKDPRSQDSTLCLFTDFDSQINVPKTMESGTFITDKCVLDMKAMDSKSNGAIAWSNQTSFTCQDIFKETNATYPSSDVPCDATLTEKSFETDMNLNFQNLLVIVLRILLLKVAGFNLLMTLRLWSS

SEQ ID NO: 1781 - protein, 6 aa, synthetic construct
NSASDY

SEQ ID NO: 1782 - protein, 7 aa, synthetic construct
IRSNMDK

SEQ ID NO: 1783 - protein, 10 aa, synthetic construct
AERGRGGKLI

SEQ ID NO: 1784 - protein, 110 aa, synthetic construct
ESVGLHLPTLSVQEGDNSIINCAYSNSASDYFIWYKQESGKGPQFIIDIRSNMDKRQGQRVTVLLNKTVKHLSLQIAATQPGDSAVYFCAERGRGGKLIFGQGTELSVKP

SEQ ID NO: 1785 - protein, 111 aa, synthetic construct
GESVGLHLPTLSVQEGDNSIINCAYSNSASDYFIWYKQESGKGPQFIIDIRSNMDKRQGQRVTVLLNKTVKHLSLQIAATQPGDSAVYFCAERGRGGKLIFGQGTELSVKP

SEQ ID NO: 1786 - protein, 131 aa, synthetic construct
  VARIANT 2: note = X can be any Amino Acid
MXGIRALFMYLWLQLDWVSRGESVGLHLPTLSVQEGDNSIINCAYSNSASDYFIWYKQESGKGPQFIIDIRSNMDKRQGQRVTVLLNKTVKHLSLQIAATQPGDSAVYFCAERGRGGKLIFGQGTELSVKP

SEQ ID NO: 1787 - protein, 131 aa, synthetic construct; identical to SEQ ID NO: 1786
  VARIANT 2: note = X can be any Amino Acid

SEQ ID NO: 1788 - protein, 268 aa, synthetic construct
MAGIRALFMYLWLQLDWVSRGESVGLHLPTLSVQEGDNSIINCAYSNSASDYFIWYKQESGKGPQFIIDIRSNMDKRQGQRVTVLLNKTVKHLSLQIAATQPGDSAVYFCAERGRGGKLIFGQGTELSVKPNIQNPEPAVYQLKDPRSQDSTLCLFTDFDSQINVPKTMESGTFITDKCVLDMKAMDSKSNGAIAWSNQTSFTCQDIFKETNATYPSSDVPCDATLTEKSFETDMNLNFQNLLVIVLRILLLKVAGFNLLMTLRLWSS

SEQ ID NO: 1789 - protein, 268 aa, synthetic construct; identical to SEQ ID NO: 1788

SEQ ID NO: 1790 - protein, 268 aa, synthetic construct
MHGIRALFMYLWLQLDWVSRGESVGLHLPTLSVQEGDNSIINCAYSNSASDYFIWYKQESGKGPQFIIDIRSNMDKRQGQRVTVLLNKTVKHLSLQIAATQPGDSAVYFCAERGRGGKLIFGQGTELSVKPNIQNPEPAVYQLKDPRSQDSTLCLFTDFDSQINVPKTMESGTFITDKCVLDMKAMDSKSNGAIAWSNQTSFTCQDIFKETNATYPSSDVPCDATLTEKSFETDMNLNFQNLLVIVLRILLLKVAGFNLLMTLRLWSS

SEQ ID NO: 1791 - protein, 6 aa, synthetic construct
NSASDY

SEQ ID NO: 1792 - protein, 7 aa, synthetic construct
IRSNMDK

SEQ ID NO: 1793 - protein, 10 aa, synthetic construct
AERGRGGKLI

SEQ ID NO: 1794 - protein, 110 aa, synthetic construct; identical to SEQ ID NO: 1784

SEQ ID NO: 1795 - protein, 111 aa, synthetic construct; identical to SEQ ID NO: 1785

SEQ ID NO: 1796 - protein, 131 aa, synthetic construct; identical to SEQ ID NO: 1786
  VARIANT 2: note = X can be any Amino Acid

SEQ ID NO: 1797 - protein, 131 aa, synthetic construct; identical to SEQ ID NO: 1786
  VARIANT 2: note = X can be any Amino Acid

SEQ ID NO: 1798 - protein, 268 aa, synthetic construct; identical to SEQ ID NO: 1788

SEQ ID NO: 1799 - protein, 268 aa, synthetic construct; identical to SEQ ID NO: 1788

SEQ ID NO: 1800 - protein, 268 aa, synthetic construct; identical to SEQ ID NO: 1790

SEQ ID NO: 1801-2000 - skipped (200 entries)

SEQ ID NO: 2001 - protein, 5 aa, synthetic construct
SGHAT

SEQ ID NO: 2002 - protein, 6 aa, synthetic construct
FQNNGV

SEQ ID NO: 2003 - protein, 13 aa, synthetic construct
ASSLDPGDTGELF

SEQ ID NO: 2004 - protein, 113 aa, synthetic construct
GVAQSPRYKIIEKRQSVAFWCNPISGHATLYWYQQILGQGPKLLIQFQNNGVVDDSQLPKDRFSAERLKGVDSTLKIQPAKLEDSAVYLCASSLDPGDTGELFFGEGSRLTVL

SEQ ID NO: 2005 - protein, 115 aa, synthetic construct
EAGVAQSPRYKIIEKRQSVAFWCNPISGHATLYWYQQILGQGPKLLIQFQNNGVVDDSQLPKDRFSAERLKGVDSTLKIQPAKLEDSAVYLCASSLDPGDTGELFFGEGSRLTVL

SEQ ID NO: 2006 - protein, 134 aa, synthetic construct
  VARIANT 2: note = X can be any Amino Acid
MXTRLLCWAALCLLGAELTEAGVAQSPRYKIIEKRQSVAFWCNPISGHATLYWYQQILGQGPKLLIQFQNNGVVDDSQLPKDRFSAERLKGVDSTLKIQPAKLEDSAVYLCASSLDPGDTGELFFGEGSRLTVL

SEQ ID NO: 2007 - protein, 134 aa, synthetic construct; identical to SEQ ID NO: 2006
  VARIANT 2: note = X can be any Amino Acid

SEQ ID NO: 2008 - protein, 307 aa, synthetic construct
MGTRLLCWAALCLLGAELTEAGVAQSPRYKIIEKRQSVAFWCNPISGHATLYWYQQILGQGPKLLIQFQNNGVVDDSQLPKDRFSAERLKGVDSTLKIQPAKLEDSAVYLCASSLDPGDTGELFFGEGSRLTVLEDLRNVTPPKVSLFEPSKAEIANKQKATLVCLARGFFPDHVELSWWVNGKEVHSGVCTDPQAYKESNYSYCLSSRLRVSATFWHNPRNHFRCQVQFHGLSEEDKWPEGSPKPVTQNISAEAWGRADCGITSASYQQGVLSATILYEILLGKATLYAVLVSTLVVMAMVKRKNS

SEQ ID NO: 2009 - protein, 307 aa, synthetic construct
MATRLLCWAALCLLGAELTEAGVAQSPRYKIIEKRQSVAFWCNPISGHATLYWYQQILGQGPKLLIQFQNNGVVDDSQLPKDRFSAERLKGVDSTLKIQPAKLEDSAVYLCASSLDPGDTGELFFGEGSRLTVLEDLRNVTPPKVSLFEPSKAEIANKQKATLVCLARGFFPDHVELSWWVNGKEVHSGVCTDPQAYKESNYSYCLSSRLRVSATFWHNPRNHFRCQVQFHGLSEEDKWPEGSPKPVTQNISAEAWGRADCGITSASYQQGVLSATILYEILLGKATLYAVLVSTLVVMAMVKRKNS

SEQ ID NO: 2010 - protein, 307 aa, synthetic construct
MHTRLLCWAALCLLGAELTEAGVAQSPRYKIIEKRQSVAFWCNPISGHATLYWYQQILGQGPKLLIQFQNNGVVDDSQLPKDRFSAERLKGVDSTLKIQPAKLEDSAVYLCASSLDPGDTGELFFGEGSRLTVLEDLRNVTPPKVSLFEPSKAEIANKQKATLVCLARGFFPDHVELSWWVNGKEVHSGVCTDPQAYKESNYSYCLSSRLRVSATFWHNPRNHFRCQVQFHGLSEEDKWPEGSPKPVTQNISAEAWGRADCGITSASYQQGVLSATILYEILLGKATLYAVLVSTLVVMAMVKRKNS

SEQ ID NO: 2011 - protein, 5 aa, synthetic construct
MNHEY

SEQ ID NO: 2012 - protein, 6 aa, synthetic construct
SMNVEV

SEQ ID NO: 2013 - protein, 12 aa, synthetic construct
ASSIQQGADTQY

SEQ ID NO: 2014 - protein, 111 aa, synthetic construct
QVTQNPRYLITVTGKKLTVTCSQNMNHEYMSWYRQDPGLGLRQIYYSMNVEVTDKGDVPEGYKVSRKEKRNFPLILESPSPNQTSLYFCASSIQQGADTQYFGPGTRLTVL

SEQ ID NO: 2015 - protein, 113 aa, synthetic construct
EAQVTQNPRYLITVTGKKLTVTCSQNMNHEYMSWYRQDPGLGLRQIYYSMNVEVTDKGDVPEGYKVSRKEKRNFPLILESPSPNQTSLYFCASSIQQGADTQYFGPGTRLTVL

SEQ ID NO: 2016 - protein, 132 aa, synthetic construct
  VARIANT 2: note = X can be any Amino Acid
MXPQLLGYVVLCLLGAGPLEAQVTQNPRYLITVTGKKLTVTCSQNMNHEYMSWYRQDPGLGLRQIYYSMNVEVTDKGDVPEGYKVSRKEKRNFPLILESPSPNQTSLYFCASSIQQGADTQYFGPGTRLTVL

SEQ ID NO: 2017 - protein, 132 aa, synthetic construct; identical to SEQ ID NO: 2016
  VARIANT 2: note = X can be any Amino Acid

SEQ ID NO: 2018 - protein, 305 aa, synthetic construct
MGPQLLGYVVLCLLGAGPLEAQVTQNPRYLITVTGKKLTVTCSQNMNHEYMSWYRQDPGLGLRQIYYSMNVEVTDKGDVPEGYKVSRKEKRNFPLILESPSPNQTSLYFCASSIQQGADTQYFGPGTRLTVLEDLRNVTPPKVSLFEPSKAEIANKQKATLVCLARGFFPDHVELSWWVNGKEVHSGVCTDPQAYKESNYSYCLSSRLRVSATFWHNPRNHFRCQVQFHGLSEEDKWPEGSPKPVTQNISAEAWGRADCGITSASYQQGVLSATILYEILLGKATLYAVLVSTLVVMAMVKRKNS

SEQ ID NO: 2019 - protein, 305 aa, synthetic construct
MAPQLLGYVVLCLLGAGPLEAQVTQNPRYLITVTGKKLTVTCSQNMNHEYMSWYRQDPGLGLRQIYYSMNVEVTDKGDVPEGYKVSRKEKRNFPLILESPSPNQTSLYFCASSIQQGADTQYFGPGTRLTVLEDLRNVTPPKVSLFEPSKAEIANKQKATLVCLARGFFPDHVELSWWVNGKEVHSGVCTDPQAYKESNYSYCLSSRLRVSATFWHNPRNHFRCQVQFHGLSEEDKWPEGSPKPVTQNISAEAWGRADCGITSASYQQGVLSATILYEILLGKATLYAVLVSTLVVMAMVKRKNS

SEQ ID NO: 2020 - protein, 305 aa, synthetic construct
MHPQLLGYVVLCLLGAGPLEAQVTQNPRYLITVTGKKLTVTCSQNMNHEYMSWYRQDPGLGLRQIYYSMNVEVTDKGDVPEGYKVSRKEKRNFPLILESPSPNQTSLYFCASSIQQGADTQYFGPGTRLTVLEDLRNVTPPKVSLFEPSKAEIANKQKATLVCLARGFFPDHVELSWWVNGKEVHSGVCTDPQAYKESNYSYCLSSRLRVSATFWHNPRNHFRCQVQFHGLSEEDKWPEGSPKPVTQNISAEAWGRADCGITSASYQQGVLSATILYEILLGKATLYAVLVSTLVVMAMVKRKNS

SEQ ID NO: 2021 - protein, 5 aa, synthetic construct
MNHEY

SEQ ID NO: 2022 - protein, 6 aa, synthetic construct
SMNVEV

SEQ ID NO: 2023 - protein, 12 aa, synthetic construct
ASSIQQGADTQY

SEQ ID NO: 2024 - protein, 111 aa, synthetic construct; identical to SEQ ID NO: 2014

SEQ ID NO: 2025 - protein, 113 aa, synthetic construct; identical to SEQ ID NO: 2015

SEQ ID NO: 2026 - protein, 132 aa, synthetic construct; identical to SEQ ID NO: 2016
  VARIANT 2: note = X can be any Amino Acid

SEQ ID NO: 2027 - protein, 132 aa, synthetic construct; identical to SEQ ID NO: 2016
  VARIANT 2: note = X can be any Amino Acid

SEQ ID NO: 2028 - protein, 305 aa, synthetic construct; identical to SEQ ID NO: 2018

SEQ ID NO: 2029 - protein, 305 aa, synthetic construct; identical to SEQ ID NO: 2019

SEQ ID NO: 2030 - protein, 305 aa, synthetic construct; identical to SEQ ID NO: 2020

SEQ ID NO: 2031 - protein, 5 aa, synthetic construct
MNHNS

SEQ ID NO: 2032 - protein, 6 aa, synthetic construct
SASEGT

SEQ ID NO: 2033 - protein, 14 aa, synthetic construct
ASSEGLWQVGDEQY

SEQ ID NO: 2034 - protein, 113 aa, synthetic construct
GVTQTPKFQVLKTGQSMTLQCAQDMNHNSMYWYRQDPGMGLRLIYYSASEGTTDKGEVPNGYNVSRLNKREFSLRLESAAPSQTSVYFCASSEGLWQVGDEQYFGPGTRLTVT

SEQ ID NO: 2035 - protein, 115 aa, synthetic construct
NAGVTQTPKFQVLKTGQSMTLQCAQDMNHNSMYWYRQDPGMGLRLIYYSASEGTTDKGEVPNGYNVSRLNKREFSLRLESAAPSQTSVYFCASSEGLWQVGDEQYFGPGTRLTVT

SEQ ID NO: 2036 - protein, 134 aa, synthetic construct
  VARIANT 2: note = X can be any Amino Acid
MXIGLLCCVAFSLLWASPVNAGVTQTPKFQVLKTGQSMTLQCAQDMNHNSMYWYRQDPGMGLRLIYYSASEGTTDKGEVPNGYNVSRLNKREFSLRLESAAPSQTSVYFCASSEGLWQVGDEQYFGPGTRLTVT

SEQ ID NO: 2037 - protein, 134 aa, synthetic construct; identical to SEQ ID NO: 2036
  VARIANT 2: note = X can be any Amino Acid

SEQ ID NO: 2038 - protein, 307 aa, synthetic construct
MSIGLLCCVAFSLLWASPVNAGVTQTPKFQVLKTGQSMTLQCAQDMNHNSMYWYRQDPGMGLRLIYYSASEGTTDKGEVPNGYNVSRLNKREFSLRLESAAPSQTSVYFCASSEGLWQVGDEQYFGPGTRLTVTEDLRNVTPPKVSLFEPSKAEIANKQKATLVCLARGFFPDHVELSWWVNGKEVHSGVCTDPQAYKESNYSYCLSSRLRVSATFWHNPRNHFRCQVQFHGLSEEDKWPEGSPKPVTQNISAEAWGRADCGITSASYQQGVLSATILYEILLGKATLYAVLVSTLVVMAMVKRKNS

SEQ ID NO: 2039 - protein, 307 aa, synthetic construct
MAIGLLCCVAFSLLWASPVNAGVTQTPKFQVLKTGQSMTLQCAQDMNHNSMYWYRQDPGMGLRLIYYSASEGTTDKGEVPNGYNVSRLNKREFSLRLESAAPSQTSVYFCASSEGLWQVGDEQYFGPGTRLTVTEDLRNVTPPKVSLFEPSKAEIANKQKATLVCLARGFFPDHVELSWWVNGKEVHSGVCTDPQAYKESNYSYCLSSRLRVSATFWHNPRNHFRCQVQFHGLSEEDKWPEGSPKPVTQNISAEAWGRADCGITSASYQQGVLSATILYEILLGKATLYAVLVSTLVVMAMVKRKNS

SEQ ID NO: 2040 - protein, 307 aa, synthetic construct
MHIGLLCCVAFSLLWASPVNAGVTQTPKFQVLKTGQSMTLQCAQDMNHNSMYWYRQDPGMGLRLIYYSASEGTTDKGEVPNGYNVSRLNKREFSLRLESAAPSQTSVYFCASSEGLWQVGDEQYFGPGTRLTVTEDLRNVTPPKVSLFEPSKAEIANKQKATLVCLARGFFPDHVELSWWVNGKEVHSGVCTDPQAYKESNYSYCLSSRLRVSATFWHNPRNHFRCQVQFHGLSEEDKWPEGSPKPVTQNISAEAWGRADCGITSASYQQGVLSATILYEILLGKATLYAVLVSTLVVMAMVKRKNS

SEQ ID NO: 2041 - protein, 5 aa, synthetic construct
ENHRY

SEQ ID NO: 2042 - protein, 6 aa, synthetic construct
SYGVKD

SEQ ID NO: 2043 - protein, 13 aa, synthetic construct
AISELVTGDSPLH

SEQ ID NO: 2044 - protein, 112 aa, synthetic construct
GITQSPRHKVTETGTPVTLRCHQTENHRYMYWYRQDPGHGLRLIHYSYGVKDTDKGEVSDGYSVSRSKTEDFLLTLESATSSQTSVYFCAISELVTGDSPLHFGNGTRLTVT

SEQ ID NO: 2045 - protein, 114 aa, synthetic construct
DAGITQSPRHKVTETGTPVTLRCHQTENHRYMYWYRQDPGHGLRLIHYSYGVKDTDKGEVSDGYSVSRSKTEDFLLTLESATSSQTSVYFCAISELVTGDSPLHFGNGTRLTVT

SEQ ID NO: 2046 - protein, 133 aa, synthetic construct
  VARIANT 2: note = X can be any Amino Acid
MXTRLFFYVALCLLWTGHMDAGITQSPRHKVTETGTPVTLRCHQTENHRYMYWYRQDPGHGLRLIHYSYGVKDTDKGEVSDGYSVSRSKTEDFLLTLESATSSQTSVYFCAISELVTGDSPLHFGNGTRLTVT

SEQ ID NO: 2047 - protein, 133 aa, synthetic construct; identical to SEQ ID NO: 2046
  VARIANT 2: note = X can be any Amino Acid

SEQ ID NO: 2048 - protein, 306 aa, synthetic construct
MGTRLFFYVALCLLWTGHMDAGITQSPRHKVTETGTPVTLRCHQTENHRYMYWYRQDPGHGLRLIHYSYGVKDTDKGEVSDGYSVSRSKTEDFLLTLESATSSQTSVYFCAISELVTGDSPLHFGNGTRLTVTEDLRNVTPPKVSLFEPSKAEIANKQKATLVCLARGFFPDHVELSWWVNGKEVHSGVCTDPQAYKESNYSYCLSSRLRVSATFWHNPRNHFRCQVQFHGLSEEDKWPEGSPKPVTQNISAEAWGRADCGITSASYQQGVLSATILYEILLGKATLYAVLVSTLVVMAMVKRKNS

SEQ ID NO: 2049 - protein, 306 aa, synthetic construct
MATRLFFYVALCLLWTGHMDAGITQSPRHKVTETGTPVTLRCHQTENHRYMYWYRQDPGHGLRLIHYSYGVKDTDKGEVSDGYSVSRSKTEDFLLTLESATSSQTSVYFCAISELVTGDSPLHFGNGTRLTVTEDLRNVTPPKVSLFEPSKAEIANKQKATLVCLARGFFPDHVELSWWVNGKEVHSGVCTDPQAYKESNYSYCLSSRLRVSATFWHNPRNHFRCQVQFHGLSEEDKWPEGSPKPVTQNISAEAWGRADCGITSASYQQGVLSATILYEILLGKATLYAVLVSTLVVMAMVKRKNS

SEQ ID NO: 2050 - protein, 306 aa, synthetic construct
MHTRLFFYVALCLLWTGHMDAGITQSPRHKVTETGTPVTLRCHQTENHRYMYWYRQDPGHGLRLIHYSYGVKDTDKGEVSDGYSVSRSKTEDFLLTLESATSSQTSVYFCAISELVTGDSPLHFGNGTRLTVTEDLRNVTPPKVSLFEPSKAEIANKQKATLVCLARGFFPDHVELSWWVNGKEVHSGVCTDPQAYKESNYSYCLSSRLRVSATFWHNPRNHFRCQVQFHGLSEEDKWPEGSPKPVTQNISAEAWGRADCGITSASYQQGVLSATILYEILLGKATLYAVLVSTLVVMAMVKRKNS

SEQ ID NO: 2051 - protein, 5 aa, synthetic construct
LNHDA

SEQ ID NO: 2052 - protein, 6 aa, synthetic construct
SQIVND

SEQ ID NO: 2053 - protein, 9 aa, synthetic construct
ASSIRTEAF

SEQ ID NO: 2054 - protein, 108 aa, synthetic construct
GITQSPKYLFRKEGQNVTLSCEQNLNHDAMYWYRQDPGQGLRLIYYSQIVNDFQKGDIAEGYSVSREKKESFPLTVTSAQKNPTAFYLCASSIRTEAFFGQGTRLTVV

SEQ ID NO: 2055 - protein, 110 aa, synthetic construct
DGGITQSPKYLFRKEGQNVTLSCEQNLNHDAMYWYRQDPGQGLRLIYYSQIVNDFQKGDIAEGYSVSREKKESFPLTVTSAQKNPTAFYLCASSIRTEAFFGQGTRLTVV

SEQ ID NO: 2056 - protein, 129 aa, synthetic construct
  VARIANT 2: note = X can be any Amino Acid
MXNQVLCCVVLCFLGANTVDGGITQSPKYLFRKEGQNVTLSCEQNLNHDAMYWYRQDPGQGLRLIYYSQIVNDFQKGDIAEGYSVSREKKESFPLTVTSAQKNPTAFYLCASSIRTEAFFGQGTRLTVV

SEQ ID NO: 2057 - protein, 129 aa, synthetic construct; identical to SEQ ID NO: 2056
  VARIANT 2: note = X can be any Amino Acid

SEQ ID NO: 2058 - protein, 302 aa, synthetic construct
MSNQVLCCVVLCFLGANTVDGGITQSPKYLFRKEGQNVTLSCEQNLNHDAMYWYRQDPGQGLRLIYYSQIVNDFQKGDIAEGYSVSREKKESFPLTVTSAQKNPTAFYLCASSIRTEAFFGQGTRLTVVEDLRNVTPPKVSLFEPSKAEIANKQKATLVCLARGFFPDHVELSWWVNGKEVHSGVCTDPQAYKESNYSYCLSSRLRVSATFWHNPRNHFRCQVQFHGLSEEDKWPEGSPKPVTQNISAEAWGRADCGITSASYQQGVLSATILYEILLGKATLYAVLVSTLVVMAMVKRKNS

SEQ ID NO: 2059 - protein, 302 aa, synthetic construct
MANQVLCCVVLCFLGANTVDGGITQSPKYLFRKEGQNVTLSCEQNLNHDAMYWYRQDPGQGLRLIYYSQIVNDFQKGDIAEGYSVSREKKESFPLTVTSAQKNPTAFYLCASSIRTEAFFGQGTRLTVVEDLRNVTPPKVSLFEPSKAEIANKQKATLVCLARGFFPDHVELSWWVNGKEVHSGVCTDPQAYKESNYSYCLSSRLRVSATFWHNPRNHFRCQVQFHGLSEEDKWPEGSPKPVTQNISAEAWGRADCGITSASYQQGVLSATILYEILLGKATLYAVLVSTLVVMAMVKRKNS

SEQ ID NO: 2060 - protein, 302 aa, synthetic construct
MHNQVLCCVVLCFLGANTVDGGITQSPKYLFRKEGQNVTLSCEQNLNHDAMYWYRQDPGQGLRLIYYSQIVNDFQKGDIAEGYSVSREKKESFPLTVTSAQKNPTAFYLCASSIRTEAFFGQGTRLTVVEDLRNVTPPKVSLFEPSKAEIANKQKATLVCLARGFFPDHVELSWWVNGKEVHSGVCTDPQAYKESNYSYCLSSRLRVSATFWHNPRNHFRCQVQFHGLSEEDKWPEGSPKPVTQNISAEAWGRADCGITSASYQQGVLSATILYEILLGKATLYAVLVSTLVVMAMVKRKNS

SEQ ID NO: 2061 - protein, 5 aa, synthetic construct
MNHEY

SEQ ID NO: 2062 - protein, 6 aa, synthetic construct
SVGEGT

SEQ ID NO: 2063 - protein, 14 aa, synthetic construct
ASSYAGLAAPREQF

SEQ ID NO: 2064 - protein, 113 aa, synthetic construct
GVTQTPKFRVLKTGQSMTLLCAQDMNHEYMYWYRQDPGMGLRLIHYSVGEGTTAKGEVPDGYNVSRLKKQNFLLGLESAAPSQTSVYFCASSYAGLAAPREQFFGPGTRLTVL

SEQ ID NO: 2065 - protein, 115 aa, synthetic construct
NAGVTQTPKFRVLKTGQSMTLLCAQDMNHEYMYWYRQDPGMGLRLIHYSVGEGTTAKGEVPDGYNVSRLKKQNFLLGLESAAPSQTSVYFCASSYAGLAAPREQFFGPGTRLTVL

SEQ ID NO: 2066 - protein, 134 aa, synthetic construct
  VARIANT 2: note = X can be any Amino Acid
MXLGLLCCGAFSLLWAGPVNAGVTQTPKFRVLKTGQSMTLLCAQDMNHEYMYWYRQDPGMGLRLIHYSVGEGTTAKGEVPDGYNVSRLKKQNFLLGLESAAPSQTSVYFCASSYAGLAAPREQFFGPGTRLTVL

SEQ ID NO: 2067 - protein, 134 aa, synthetic construct; identical to SEQ ID NO: 2066
  VARIANT 2: note = X can be any Amino Acid

SEQ ID NO: 2068 - protein, 307 aa, synthetic construct
MSLGLLCCGAFSLLWAGPVNAGVTQTPKFRVLKTGQSMTLLCAQDMNHEYMYWYRQDPGMGLRLIHYSVGEGTTAKGEVPDGYNVSRLKKQNFLLGLESAAPSQTSVYFCASSYAGLAAPREQFFGPGTRLTVLEDLRNVTPPKVSLFEPSKAEIANKQKATLVCLARGFFPDHVELSWWVNGKEVHSGVCTDPQAYKESNYSYCLSSRLRVSATFWHNPRNHFRCQVQFHGLSEEDKWPEGSPKPVTQNISAEAWGRADCGITSASYQQGVLSATILYEILLGKATLYAVLVSTLVVMAMVKRKNS

SEQ ID NO: 2069 - protein, 307 aa, synthetic construct
MALGLLCCGAFSLLWAGPVNAGVTQTPKFRVLKTGQSMTLLCAQDMNHEYMYWYRQDPGMGLRLIHYSVGEGTTAKGEVPDGYNVSRLKKQNFLLGLESAAPSQTSVYFCASSYAGLAAPREQFFGPGTRLTVLEDLRNVTPPKVSLFEPSKAEIANKQKATLVCLARGFFPDHVELSWWVNGKEVHSGVCTDPQAYKESNYSYCLSSRLRVSATFWHNPRNHFRCQVQFHGLSEEDKWPEGSPKPVTQNISAEAWGRADCGITSASYQQGVLSATILYEILLGKATLYAVLVSTLVVMAMVKRKNS

SEQ ID NO: 2070 - protein, 307 aa, synthetic construct
MHLGLLCCGAFSLLWAGPVNAGVTQTPKFRVLKTGQSMTLLCAQDMNHEYMYWYRQDPGMGLRLIHYSVGEGTTAKGEVPDGYNVSRLKKQNFLLGLESAAPSQTSVYFCASSYAGLAAPREQFFGPGTRLTVLEDLRNVTPPKVSLFEPSKAEIANKQKATLVCLARGFFPDHVELSWWVNGKEVHSGVCTDPQAYKESNYSYCLSSRLRVSATFWHNPRNHFRCQVQFHGLSEEDKWPEGSPKPVTQNISAEAWGRADCGITSASYQQGVLSATILYEILLGKATLYAVLVSTLVVMAMVKRKNS

SEQ ID NO: 2071 - protein, 5 aa, synthetic construct
LNHDA

SEQ ID NO: 2072 - protein, 6 aa, synthetic construct
SQIVND

SEQ ID NO: 2073 - protein, 9 aa, synthetic construct
ASLQFNEQF

SEQ ID NO: 2074 - protein, 108 aa, synthetic construct
GITQSPKYLFRKEGQNVTLSCEQNLNHDAMYWYRQDPGQGLRLIYYSQIVNDFQKGDIAEGYSVSREKKESFPLTVTSAQKNPTAFYLCASLQFNEQFFGPGTRLTVL

SEQ ID NO: 2075 - protein, 110 aa, synthetic construct
DGGITQSPKYLFRKEGQNVTLSCEQNLNHDAMYWYRQDPGQGLRLIYYSQIVNDFQKGDIAEGYSVSREKKESFPLTVTSAQKNPTAFYLCASLQFNEQFFGPGTRLTVL

SEQ ID NO: 2076 - protein, 131 aa, synthetic construct
  VARIANT 2: note = X can be any Amino Acid
MXMSNQVLCCVVLCFLGANTVDGGITQSPKYLFRKEGQNVTLSCEQNLNHDAMYWYRQDPGQGLRLIYYSQIVNDFQKGDIAEGYSVSREKKESFPLTVTSAQKNPTAFYLCASLQFNEQFFGPGTRLTVL

SEQ ID NO: 2077 - protein, 129 aa, synthetic construct
  VARIANT 2: note = X can be any Amino Acid
MXNQVLCCVVLCFLGANTVDGGITQSPKYLFRKEGQNVTLSCEQNLNHDAMYWYRQDPGQGLRLIYYSQIVNDFQKGDIAEGYSVSREKKESFPLTVTSAQKNPTAFYLCASLQFNEQFFGPGTRLTVL

SEQ ID NO: 2078 - protein, 304 aa, synthetic construct
MSMSNQVLCCVVLCFLGANTVDGGITQSPKYLFRKEGQNVTLSCEQNLNHDAMYWYRQDPGQGLRLIYYSQIVNDFQKGDIAEGYSVSREKKESFPLTVTSAQKNPTAFYLCASLQFNEQFFGPGTRLTVLEDLRNVTPPKVSLFEPSKAEIANKQKATLVCLARGFFPDHVELSWWVNGKEVHSGVCTDPQAYKESNYSYCLSSRLRVSATFWHNPRNHFRCQVQFHGLSEEDKWPEGSPKPVTQNISAEAWGRADCGITSASYQQGVLSATILYEILLGKATLYAVLVSTLVVMAMVKRKNS

SEQ ID NO: 2079 - protein, 304 aa, synthetic construct
MAMSNQVLCCVVLCFLGANTVDGGITQSPKYLFRKEGQNVTLSCEQNLNHDAMYWYRQDPGQGLRLIYYSQIVNDFQKGDIAEGYSVSREKKESFPLTVTSAQKNPTAFYLCASLQFNEQFFGPGTRLTVLEDLRNVTPPKVSLFEPSKAEIANKQKATLVCLARGFFPDHVELSWWVNGKEVHSGVCTDPQAYKESNYSYCLSSRLRVSATFWHNPRNHFRCQVQFHGLSEEDKWPEGSPKPVTQNISAEAWGRADCGITSASYQQGVLSATILYEILLGKATLYAVLVSTLVVMAMVKRKNS

SEQ ID NO: 2080 - protein, 304 aa, synthetic construct
MHMSNQVLCCVVLCFLGANTVDGGITQSPKYLFRKEGQNVTLSCEQNLNHDAMYWYRQDPGQGLRLIYYSQIVNDFQKGDIAEGYSVSREKKESFPLTVTSAQKNPTAFYLCASLQFNEQFFGPGTRLTVLEDLRNVTPPKVSLFEPSKAEIANKQKATLVCLARGFFPDHVELSWWVNGKEVHSGVCTDPQAYKESNYSYCLSSRLRVSATFWHNPRNHFRCQVQFHGLSEEDKWPEGSPKPVTQNISAEAWGRADCGITSASYQQGVLSATILYEILLGKATLYAVLVSTLVVMAMVKRKNS

SEQ ID NO: 2081 - protein, 5 aa, synthetic construct
MNHEY

SEQ ID NO: 2082 - protein, 6 aa, synthetic construct
SVGEGT

SEQ ID NO: 2083 - protein, 12 aa, synthetic construct
ASRLQGWNSPLH

SEQ ID NO: 2084 - protein, 111 aa, synthetic construct
GVTQTPKFRVLKTGQSMTLLCAQDMNHEYMYWYRQDPGMGLRLIHYSVGEGTTAKGEVPDGYNVSRLKKQNFLLGLESAAPSQTSVYFCASRLQGWNSPLHFGNGTRLTVT

SEQ ID NO: 2085 - protein, 113 aa, synthetic construct
NAGVTQTPKFRVLKTGQSMTLLCAQDMNHEYMYWYRQDPGMGLRLIHYSVGEGTTAKGEVPDGYNVSRLKKQNFLLGLESAAPSQTSVYFCASRLQGWNSPLHFGNGTRLTVT

SEQ ID NO: 2086 - protein, 132 aa, synthetic construct
  VARIANT 2: note = X can be any Amino Acid
MXLGLLCCGAFSLLWAGPVNAGVTQTPKFRVLKTGQSMTLLCAQDMNHEYMYWYRQDPGMGLRLIHYSVGEGTTAKGEVPDGYNVSRLKKQNFLLGLESAAPSQTSVYFCASRLQGWNSPLHFGNGTRLTVT

SEQ ID NO: 2087 - protein, 132 aa, synthetic construct; identical to SEQ ID NO: 2086
  VARIANT 2: note = X can be any Amino Acid

SEQ ID NO: 2088 - protein, 305 aa, synthetic construct
MSLGLLCCGAFSLLWAGPVNAGVTQTPKFRVLKTGQSMTLLCAQDMNHEYMYWYRQDPGMGLRLIHYSVGEGTTAKGEVPDGYNVSRLKKQNFLLGLESAAPSQTSVYFCASRLQGWNSPLHFGNGTRLTVTEDLRNVTPPKVSLFEPSKAEIANKQKATLVCLARGFFPDHVELSWWVNGKEVHSGVCTDPQAYKESNYSYCLSSRLRVSATFWHNPRNHFRCQVQFHGLSEEDKWPEGSPKPVTQNISAEAWGRADCGITSASYQQGVLSATILYEILLGKATLYAVLVSTLVVMAMVKRKNS

SEQ ID NO: 2089 - protein, 305 aa, synthetic construct
MALGLLCCGAFSLLWAGPVNAGVTQTPKFRVLKTGQSMTLLCAQDMNHEYMYWYRQDPGMGLRLIHYSVGEGTTAKGEVPDGYNVSRLKKQNFLLGLESAAPSQTSVYFCASRLQGWNSPLHFGNGTRLTVTEDLRNVTPPKVSLFEPSKAEIANKQKATLVCLARGFFPDHVELSWWVNGKEVHSGVCTDPQAYKESNYSYCLSSRLRVSATFWHNPRNHFRCQVQFHGLSEEDKWPEGSPKPVTQNISAEAWGRADCGITSASYQQGVLSATILYEILLGKATLYAVLVSTLVVMAMVKRKNS

SEQ ID NO: 2090 - protein, 305 aa, synthetic construct
MHLGLLCCGAFSLLWAGPVNAGVTQTPKFRVLKTGQSMTLLCAQDMNHEYMYWYRQDPGMGLRLIHYSVGEGTTAKGEVPDGYNVSRLKKQNFLLGLESAAPSQTSVYFCASRLQGWNSPLHFGNGTRLTVTEDLRNVTPPKVSLFEPSKAEIANKQKATLVCLARGFFPDHVELSWWVNGKEVHSGVCTDPQAYKESNYSYCLSSRLRVSATFWHNPRNHFRCQVQFHGLSEEDKWPEGSPKPVTQNISAEAWGRADCGITSASYQQGVLSATILYEILLGKATLYAVLVSTLVVMAMVKRKNS

SEQ ID NO: 2091 - protein, 5 aa, synthetic construct
MNHEY

SEQ ID NO: 2092 - protein, 6 aa, synthetic construct
SMNVEV

SEQ ID NO: 2093 - protein, 15 aa, synthetic construct
ASSPFVVIGQINEQY

SEQ ID NO: 2094 - protein, 114 aa, synthetic construct
QVTQNPRYLITVTGKKLTVTCSQNMNHEYMSWYRQDPGLGLRQIYYSMNVEVTDKGDVPEGYKVSRKEKRNFPLILESPSPNQTSLYFCASSPFVVIGQINEQYFGPGTRLTVT

SEQ ID NO: 2095 - protein, 116 aa, synthetic construct
EAQVTQNPRYLITVTGKKLTVTCSQNMNHEYMSWYRQDPGLGLRQIYYSMNVEVTDKGDVPEGYKVSRKEKRNFPLILESPSPNQTSLYFCASSPFVVIGQINEQYFGPGTRLTVT

SEQ ID NO: 2096 - protein, 135 aa, synthetic construct
  VARIANT 2: note = X can be any Amino Acid
MXPQLLGYVVLCLLGAGPLEAQVTQNPRYLITVTGKKLTVTCSQNMNHEYMSWYRQDPGLGLRQIYYSMNVEVTDKGDVPEGYKVSRKEKRNFPLILESPSPNQTSLYFCASSPFVVIGQINEQYFGPGTRLTVT

SEQ ID NO: 2097 - protein, 135 aa, synthetic construct; identical to SEQ ID NO: 2096
  VARIANT 2: note = X can be any Amino Acid

SEQ ID NO: 2098 - protein, 308 aa, synthetic construct
MGPQLLGYVVLCLLGAGPLEAQVTQNPRYLITVTGKKLTVTCSQNMNHEYMSWYRQDPGLGLRQIYYSMNVEVTDKGDVPEGYKVSRKEKRNFPLILESPSPNQTSLYFCASSPFVVIGQINEQYFGPGTRLTVTEDLRNVTPPKVSLFEPSKAEIANKQKATLVCLARGFFPDHVELSWWVNGKEVHSGVCTDPQAYKESNYSYCLSSRLRVSATFWHNPRNHFRCQVQFHGLSEEDKWPEGSPKPVTQNISAEAWGRADCGITSASYQQGVLSATILYEILLGKATLYAVLVSTLVVMAMVKRKNS

SEQ ID NO: 2099 - protein, 308 aa, synthetic construct
MAPQLLGYVVLCLLGAGPLEAQVTQNPRYLITVTGKKLTVTCSQNMNHEYMSWYRQDPGLGLRQIYYSMNVEVTDKGDVPEGYKVSRKEKRNFPLILESPSPNQTSLYFCASSPFVVIGQINEQYFGPGTRLTVTEDLRNVTPPKVSLFEPSKAEIANKQKATLVCLARGFFPDHVELSWWVNGKEVHSGVCTDPQAYKESNYSYCLSSRLRVSATFWHNPRNHFRCQVQFHGLSEEDKWPEGSPKPVTQNISAEAWGRADCGITSASYQQGVLSATILYEILLGKATLYAVLVSTLVVMAMVKRKNS

SEQ ID NO: 2100 - protein, 308 aa, synthetic construct
MHPQLLGYVVLCLLGAGPLEAQVTQNPRYLITVTGKKLTVTCSQNMNHEYMSWYRQDPGLGLRQIYYSMNVEVTDKGDVPEGYKVSRKEKRNFPLILESPSPNQTSLYFCASSPFVVIGQINEQYFGPGTRLTVTEDLRNVTPPKVSLFEPSKAEIANKQKATLVCLARGFFPDHVELSWWVNGKEVHSGVCTDPQAYKESNYSYCLSSRLRVSATFWHNPRNHFRCQVQFHGLSEEDKWPEGSPKPVTQNISAEAWGRADCGITSASYQQGVLSATILYEILLGKATLYAVLVSTLVVMAMVKRKNS

SEQ ID NO: 2101 - protein, 5 aa, synthetic construct
LNHDA

SEQ ID NO: 2102 - protein, 6 aa, synthetic construct
SQIVND

SEQ ID NO: 2103 - protein, 9 aa, synthetic construct
ATRTGNEAF

SEQ ID NO: 2104 - protein, 108 aa, synthetic construct
GITQSPKYLFRKEGQNVTLSCEQNLNHDAMYWYRQDPGQGLRLIYYSQIVNDFQKGDIAEGYSVSREKKESFPLTVTSAQKNPTAFYLCATRTGNEAFFGQGTRLTVV

SEQ ID NO: 2105 - protein, 110 aa, synthetic construct
DGGITQSPKYLFRKEGQNVTLSCEQNLNHDAMYWYRQDPGQGLRLIYYSQIVNDFQKGDIAEGYSVSREKKESFPLTVTSAQKNPTAFYLCATRTGNEAFFGQGTRLTVV

SEQ ID NO: 2106 - protein, 129 aa, synthetic construct
  VARIANT 2: note = X can be any Amino Acid
MXNQVLCCVVLCFLGANTVDGGITQSPKYLFRKEGQNVTLSCEQNLNHDAMYWYRQDPGQGLRLIYYSQIVNDFQKGDIAEGYSVSREKKESFPLTVTSAQKNPTAFYLCATRTGNEAFFGQGTRLTVV

SEQ ID NO: 2107 - protein, 129 aa, synthetic construct; identical to SEQ ID NO: 2106
  VARIANT 2: note = X can be any Amino Acid

SEQ ID NO: 2108 - protein, 302 aa, synthetic construct
MSNQVLCCVVLCFLGANTVDGGITQSPKYLFRKEGQNVTLSCEQNLNHDAMYWYRQDPGQGLRLIYYSQIVNDFQKGDIAEGYSVSREKKESFPLTVTSAQKNPTAFYLCATRTGNEAFFGQGTRLTVVEDLRNVTPPKVSLFEPSKAEIANKQKATLVCLARGFFPDHVELSWWVNGKEVHSGVCTDPQAYKESNYSYCLSSRLRVSATFWHNPRNHFRCQVQFHGLSEEDKWPEGSPKPVTQNISAEAWGRADCGITSASYQQGVLSATILYEILLGKATLYAVLVSTLVVMAMVKRKNS

SEQ ID NO: 2109 - protein, 302 aa, synthetic construct
MANQVLCCVVLCFLGANTVDGGITQSPKYLFRKEGQNVTLSCEQNLNHDAMYWYRQDPGQGLRLIYYSQIVNDFQKGDIAEGYSVSREKKESFPLTVTSAQKNPTAFYLCATRTGNEAFFGQGTRLTVVEDLRNVTPPKVSLFEPSKAEIANKQKATLVCLARGFFPDHVELSWWVNGKEVHSGVCTDPQAYKESNYSYCLSSRLRVSATFWHNPRNHFRCQVQFHGLSEEDKWPEGSPKPVTQNISAEAWGRADCGITSASYQQGVLSATILYEILLGKATLYAVLVSTLVVMAMVKRKNS

SEQ ID NO: 2110 - protein, 302 aa, synthetic construct
MHNQVLCCVVLCFLGANTVDGGITQSPKYLFRKEGQNVTLSCEQNLNHDAMYWYRQDPGQGLRLIYYSQIVNDFQKGDIAEGYSVSREKKESFPLTVTSAQKNPTAFYLCATRTGNEAFFGQGTRLTVVEDLRNVTPPKVSLFEPSKAEIANKQKATLVCLARGFFPDHVELSWWVNGKEVHSGVCTDPQAYKESNYSYCLSSRLRVSATFWHNPRNHFRCQVQFHGLSEEDKWPEGSPKPVTQNISAEAWGRADCGITSASYQQGVLSATILYEILLGKATLYAVLVSTLVVMAMVKRKNS

SEQ ID NO: 2111 - protein, 5 aa, synthetic construct
SNHLY

SEQ ID NO: 2112 - protein, 6 aa, synthetic construct
FYNNEI

SEQ ID NO: 2113 - protein, 13 aa, synthetic construct
ASSEYQSQSNEQF

SEQ ID NO: 2114 - protein, 115 aa, synthetic construct
EPEVTQTPSHQVTQMGQEVILRCVPISNHLYFYWYRQILGQKVEFLVSFYNNEISEKSEIFDDQFSVERPDGSNFTLKIRSTKLEDSAMYFCASSEYQSQSNEQFFGPGTRLTVL

SEQ ID NO: 2115 - protein, 115 aa, synthetic construct; identical to SEQ ID NO: 2114

SEQ ID NO: 2116 - protein, 134 aa, synthetic construct
  VARIANT 2: note = X can be any Amino Acid
MXTWLVCWAIFSLLKAGLTEPEVTQTPSHQVTQMGQEVILRCVPISNHLYFYWYRQILGQKVEFLVSFYNNEISEKSEIFDDQFSVERPDGSNFTLKIRSTKLEDSAMYFCASSEYQSQSNEQFFGPGTRLTVL

SEQ ID NO: 2117 - protein, 134 aa, synthetic construct; identical to SEQ ID NO: 2116
  VARIANT 2: note = X can be any Amino Acid

SEQ ID NO: 2118 - protein, 307 aa, synthetic construct
MDTWLVCWAIFSLLKAGLTEPEVTQTPSHQVTQMGQEVILRCVPISNHLYFYWYRQILGQKVEFLVSFYNNEISEKSEIFDDQFSVERPDGSNFTLKIRSTKLEDSAMYFCASSEYQSQSNEQFFGPGTRLTVLEDLRNVTPPKVSLFEPSKAEIANKQKATLVCLARGFFPDHVELSWWVNGKEVHSGVCTDPQAYKESNYSYCLSSRLRVSATFWHNPRNHFRCQVQFHGLSEEDKWPEGSPKPVTQNISAEAWGRADCGITSASYQQGVLSATILYEILLGKATLYAVLVSTLVVMAMVKRKNS

SEQ ID NO: 2119 - protein, 307 aa, synthetic construct
MATWLVCWAIFSLLKAGLTEPEVTQTPSHQVTQMGQEVILRCVPISNHLYFYWYRQILGQKVEFLVSFYNNEISEKSEIFDDQFSVERPDGSNFTLKIRSTKLEDSAMYFCASSEYQSQSNEQFFGPGTRLTVLEDLRNVTPPKVSLFEPSKAEIANKQKATLVCLARGFFPDHVELSWWVNGKEVHSGVCTDPQAYKESNYSYCLSSRLRVSATFWHNPRNHFRCQVQFHGLSEEDKWPEGSPKPVTQNISAEAWGRADCGITSASYQQGVLSATILYEILLGKATLYAVLVSTLVVMAMVKRKNS

SEQ ID NO: 2120 - protein, 307 aa, synthetic construct
MHTWLVCWAIFSLLKAGLTEPEVTQTPSHQVTQMGQEVILRCVPISNHLYFYWYRQILGQKVEFLVSFYNNEISEKSEIFDDQFSVERPDGSNFTLKIRSTKLEDSAMYFCASSEYQSQSNEQFFGPGTRLTVLEDLRNVTPPKVSLFEPSKAEIANKQKATLVCLARGFFPDHVELSWWVNGKEVHSGVCTDPQAYKESNYSYCLSSRLRVSATFWHNPRNHFRCQVQFHGLSEEDKWPEGSPKPVTQNISAEAWGRADCGITSASYQQGVLSATILYEILLGKATLYAVLVSTLVVMAMVKRKNS

SEQ ID NO: 2121 - protein, 5 aa, synthetic construct
MNHEY

SEQ ID NO: 2122 - protein, 6 aa, synthetic construct
SMNVEV

SEQ ID NO: 2123 - protein, 12 aa, synthetic construct
ASGLVGFNQPQH

SEQ ID NO: 2124 - protein, 111 aa, synthetic construct
QVTQNPRYLITVTGKKLTVTCSQNMNHEYMSWYRQDPGLGLRQIYYSMNVEVTDKGDVPEGYKVSRKEKRNFPLILESPSPNQTSLYFCASGLVGFNQPQHFGDGTRLSIL

SEQ ID NO: 2125 - protein, 113 aa, synthetic construct
EAQVTQNPRYLITVTGKKLTVTCSQNMNHEYMSWYRQDPGLGLRQIYYSMNVEVTDKGDVPEGYKVSRKEKRNFPLILESPSPNQTSLYFCASGLVGFNQPQHFGDGTRLSIL

SEQ ID NO: 2126 - protein, 132 aa, synthetic construct
  VARIANT 2: note = X can be any Amino Acid
MXPQLLGYVVLCLLGAGPLEAQVTQNPRYLITVTGKKLTVTCSQNMNHEYMSWYRQDPGLGLRQIYYSMNVEVTDKGDVPEGYKVSRKEKRNFPLILESPSPNQTSLYFCASGLVGFNQPQHFGDGTRLSIL

SEQ ID NO: 2127 - protein, 132 aa, synthetic construct; identical to SEQ ID NO: 2126
  VARIANT 2: note = X can be any Amino Acid

SEQ ID NO: 2128 - protein, 305 aa, synthetic construct
MGPQLLGYVVLCLLGAGPLEAQVTQNPRYLITVTGKKLTVTCSQNMNHEYMSWYRQDPGLGLRQIYYSMNVEVTDKGDVPEGYKVSRKEKRNFPLILESPSPNQTSLYFCASGLVGFNQPQHFGDGTRLSILEDLRNVTPPKVSLFEPSKAEIANKQKATLVCLARGFFPDHVELSWWVNGKEVHSGVCTDPQAYKESNYSYCLSSRLRVSATFWHNPRNHFRCQVQFHGLSEEDKWPEGSPKPVTQNISAEAWGRADCGITSASYQQGVLSATILYEILLGKATLYAVLVSTLVVMAMVKRKNS

SEQ ID NO: 2129 - protein, 305 aa, synthetic construct
MAPQLLGYVVLCLLGAGPLEAQVTQNPRYLITVTGKKLTVTCSQNMNHEYMSWYRQDPGLGLRQIYYSMNVEVTDKGDVPEGYKVSRKEKRNFPLILESPSPNQTSLYFCASGLVGFNQPQHFGDGTRLSILEDLRNVTPPKVSLFEPSKAEIANKQKATLVCLARGFFPDHVELSWWVNGKEVHSGVCTDPQAYKESNYSYCLSSRLRVSATFWHNPRNHFRCQVQFHGLSEEDKWPEGSPKPVTQNISAEAWGRADCGITSASYQQGVLSATILYEILLGKATLYAVLVSTLVVMAMVKRKNS

SEQ ID NO: 2130 - protein, 305 aa, synthetic construct
MHPQLLGYVVLCLLGAGPLEAQVTQNPRYLITVTGKKLTVTCSQNMNHEYMSWYRQDPGLGLRQIYYSMNVEVTDKGDVPEGYKVSRKEKRNFPLILESPSPNQTSLYFCASGLVGFNQPQHFGDGTRLSILEDLRNVTPPKVSLFEPSKAEIANKQKATLVCLARGFFPDHVELSWWVNGKEVHSGVCTDPQAYKESNYSYCLSSRLRVSATFWHNPRNHFRCQVQFHGLSEEDKWPEGSPKPVTQNISAEAWGRADCGITSASYQQGVLSATILYEILLGKATLYAVLVSTLVVMAMVKRKNS

SEQ ID NO: 2131 - protein, 5 aa, synthetic construct
SEHNR

SEQ ID NO: 2132 - protein, 6 aa, synthetic construct
FQNEAQ

SEQ ID NO: 2133 - protein, 11 aa, synthetic construct
ASSPGLAYEQY

SEQ ID NO: 2134 - protein, 113 aa, synthetic construct
DTGVSQDPRHKITKRGQNVTFRCDPISEHNRLYWYRQTLGQGPEFLTYFQNEAQLEKSRLLSDRFSAERPKGSFSTLEIQRTEQGDSAMYLCASSPGLAYEQYFGPGTRLTVT

SEQ ID NO: 2135 - protein, 113 aa, synthetic construct; identical to SEQ ID NO: 2134

SEQ ID NO: 2136 - protein, 132 aa, synthetic construct
  VARIANT 2: note = X can be any Amino Acid
MXTSLLCWMALCLLGADHADTGVSQDPRHKITKRGQNVTFRCDPISEHNRLYWYRQTLGQGPEFLTYFQNEAQLEKSRLLSDRFSAERPKGSFSTLEIQRTEQGDSAMYLCASSPGLAYEQYFGPGTRLTVT

SEQ ID NO: 2137 - protein, 132 aa, synthetic construct; identical to SEQ ID NO: 2136
  VARIANT 2: note = X can be any Amino Acid

SEQ ID NO: 2138 - protein, 305 aa, synthetic construct
MGTSLLCWMALCLLGADHADTGVSQDPRHKITKRGQNVTFRCDPISEHNRLYWYRQTLGQGPEFLTYFQNEAQLEKSRLLSDRFSAERPKGSFSTLEIQRTEQGDSAMYLCASSPGLAYEQYFGPGTRLTVTEDLRNVTPPKVSLFEPSKAEIANKQKATLVCLARGFFPDHVELSWWVNGKEVHSGVCTDPQAYKESNYSYCLSSRLRVSATFWHNPRNHFRCQVQFHGLSEEDKWPEGSPKPVTQNISAEAWGRADCGITSASYQQGVLSATILYEILLGKATLYAVLVSTLVVMAMVKRKNS

SEQ ID NO: 2139 - protein, 305 aa, synthetic construct
MATSLLCWMALCLLGADHADTGVSQDPRHKITKRGQNVTFRCDPISEHNRLYWYRQTLGQGPEFLTYFQNEAQLEKSRLLSDRFSAERPKGSFSTLEIQRTEQGDSAMYLCASSPGLAYEQYFGPGTRLTVTEDLRNVTPPKVSLFEPSKAEIANKQKATLVCLARGFFPDHVELSWWVNGKEVHSGVCTDPQAYKESNYSYCLSSRLRVSATFWHNPRNHFRCQVQFHGLSEEDKWPEGSPKPVTQNISAEAWGRADCGITSASYQQGVLSATILYEILLGKATLYAVLVSTLVVMAMVKRKNS

SEQ ID NO: 2140 - protein, 305 aa, synthetic construct
MHTSLLCWMALCLLGADHADTGVSQDPRHKITKRGQNVTFRCDPISEHNRLYWYRQTLGQGPEFLTYFQNEAQLEKSRLLSDRFSAERPKGSFSTLEIQRTEQGDSAMYLCASSPGLAYEQYFGPGTRLTVTEDLRNVTPPKVSLFEPSKAEIANKQKATLVCLARGFFPDHVELSWWVNGKEVHSGVCTDPQAYKESNYSYCLSSRLRVSATFWHNPRNHFRCQVQFHGLSEEDKWPEGSPKPVTQNISAEAWGRADCGITSASYQQGVLSATILYEILLGKATLYAVLVSTLVVMAMVKRKNS

SEQ ID NO: 2141 - protein, 5 aa, synthetic construct
MNHEY

SEQ ID NO: 2142 - protein, 6 aa, synthetic construct
SVGEGT

SEQ ID NO: 2143 - protein, 13 aa, synthetic construct
ASSYSQAWGQPQH

SEQ ID NO: 2144 - protein, 112 aa, synthetic construct
GVTQTPKFRVLKTGQSMTLLCAQDMNHEYMYWYRQDPGMGLRLIHYSVGEGTTAKGEVPDGYNVSRLKKQNFLLGLESAAPSQTSVYFCASSYSQAWGQPQHFGDGTRLSIL

SEQ ID NO: 2145 - protein, 114 aa, synthetic construct
NAGVTQTPKFRVLKTGQSMTLLCAQDMNHEYMYWYRQDPGMGLRLIHYSVGEGTTAKGEVPDGYNVSRLKKQNFLLGLESAAPSQTSVYFCASSYSQAWGQPQHFGDGTRLSIL

SEQ ID NO: 2146 - protein, 133 aa, synthetic construct
  VARIANT 2: note = X can be any Amino Acid
MXLGLLCCGAFSLLWAGPVNAGVTQTPKFRVLKTGQSMTLLCAQDMNHEYMYWYRQDPGMGLRLIHYSVGEGTTAKGEVPDGYNVSRLKKQNFLLGLESAAPSQTSVYFCASSYSQAWGQPQHFGDGTRLSIL

SEQ ID NO: 2147 - protein, 133 aa, synthetic construct; identical to SEQ ID NO: 2146
  VARIANT 2: note = X can be any Amino Acid

SEQ ID NO: 2148 - protein, 306 aa, synthetic construct
MSLGLLCCGAFSLLWAGPVNAGVTQTPKFRVLKTGQSMTLLCAQDMNHEYMYWYRQDPGMGLRLIHYSVGEGTTAKGEVPDGYNVSRLKKQNFLLGLESAAPSQTSVYFCASSYSQAWGQPQHFGDGTRLSILEDLRNVTPPKVSLFEPSKAEIANKQKATLVCLARGFFPDHVELSWWVNGKEVHSGVCTDPQAYKESNYSYCLSSRLRVSATFWHNPRNHFRCQVQFHGLSEEDKWPEGSPKPVTQNISAEAWGRADCGITSASYQQGVLSATILYEILLGKATLYAVLVSTLVVMAMVKRKNS

SEQ ID NO: 2149 - protein, 306 aa, synthetic construct
MALGLLCCGAFSLLWAGPVNAGVTQTPKFRVLKTGQSMTLLCAQDMNHEYMYWYRQDPGMGLRLIHYSVGEGTTAKGEVPDGYNVSRLKKQNFLLGLESAAPSQTSVYFCASSYSQAWGQPQHFGDGTRLSILEDLRNVTPPKVSLFEPSKAEIANKQKATLVCLARGFFPDHVELSWWVNGKEVHSGVCTDPQAYKESNYSYCLSSRLRVSATFWHNPRNHFRCQVQFHGLSEEDKWPEGSPKPVTQNISAEAWGRADCGITSASYQQGVLSATILYEILLGKATLYAVLVSTLVVMAMVKRKNS

SEQ ID NO: 2150 - protein, 306 aa, synthetic construct
MHLGLLCCGAFSLLWAGPVNAGVTQTPKFRVLKTGQSMTLLCAQDMNHEYMYWYRQDPGMGLRLIHYSVGEGTTAKGEVPDGYNVSRLKKQNFLLGLESAAPSQTSVYFCASSYSQAWGQPQHFGDGTRLSILEDLRNVTPPKVSLFEPSKAEIANKQKATLVCLARGFFPDHVELSWWVNGKEVHSGVCTDPQAYKESNYSYCLSSRLRVSATFWHNPRNHFRCQVQFHGLSEEDKWPEGSPKPVTQNISAEAWGRADCGITSASYQQGVLSATILYEILLGKATLYAVLVSTLVVMAMVKRKNS

SEQ ID NO: 2151 - protein, 5 aa, synthetic construct
LNHDA

SEQ ID NO: 2152 - protein, 6 aa, synthetic construct
SQIVND

SEQ ID NO: 2153 - protein, 12 aa, synthetic construct
ASSISAGGDGYT

SEQ ID NO: 2154 - protein, 111 aa, synthetic construct
GITQSPKYLFRKEGQNVTLSCEQNLNHDAMYWYRQDPGQGLRLIYYSQIVNDFQKGDIAEGYSVSREKKESFPLTVTSAQKNPTAFYLCASSISAGGDGYTFGSGTRLTVV

SEQ ID NO: 2155 - protein, 113 aa, synthetic construct
DGGITQSPKYLFRKEGQNVTLSCEQNLNHDAMYWYRQDPGQGLRLIYYSQIVNDFQKGDIAEGYSVSREKKESFPLTVTSAQKNPTAFYLCASSISAGGDGYTFGSGTRLTVV

SEQ ID NO: 2156 - protein, 132 aa, synthetic construct
  VARIANT 2: note = X can be any Amino Acid
MXNQVLCCVVLCFLGANTVDGGITQSPKYLFRKEGQNVTLSCEQNLNHDAMYWYRQDPGQGLRLIYYSQIVNDFQKGDIAEGYSVSREKKESFPLTVTSAQKNPTAFYLCASSISAGGDGYTFGSGTRLTVV

SEQ ID NO: 2157 - protein, 132 aa, synthetic construct; identical to SEQ ID NO: 2156
  VARIANT 2: note = X can be any Amino Acid

SEQ ID NO: 2158 - protein, 305 aa, synthetic construct
MSNQVLCCVVLCFLGANTVDGGITQSPKYLFRKEGQNVTLSCEQNLNHDAMYWYRQDPGQGLRLIYYSQIVNDFQKGDIAEGYSVSREKKESFPLTVTSAQKNPTAFYLCASSISAGGDGYTFGSGTRLTVVEDLRNVTPPKVSLFEPSKAEIANKQKATLVCLARGFFPDHVELSWWVNGKEVHSGVCTDPQAYKESNYSYCLSSRLRVSATFWHNPRNHFRCQVQFHGLSEEDKWPEGSPKPVTQNISAEAWGRADCGITSASYQQGVLSATILYEILLGKATLYAVLVSTLVVMAMVKRKNS

SEQ ID NO: 2159 - protein, 305 aa, synthetic construct
MANQVLCCVVLCFLGANTVDGGITQSPKYLFRKEGQNVTLSCEQNLNHDAMYWYRQDPGQGLRLIYYSQIVNDFQKGDIAEGYSVSREKKESFPLTVTSAQKNPTAFYLCASSISAGGDGYTFGSGTRLTVVEDLRNVTPPKVSLFEPSKAEIANKQKATLVCLARGFFPDHVELSWWVNGKEVHSGVCTDPQAYKESNYSYCLSSRLRVSATFWHNPRNHFRCQVQFHGLSEEDKWPEGSPKPVTQNISAEAWGRADCGITSASYQQGVLSATILYEILLGKATLYAVLVSTLVVMAMVKRKNS

SEQ ID NO: 2160 - protein, 305 aa, synthetic construct
MHNQVLCCVVLCFLGANTVDGGITQSPKYLFRKEGQNVTLSCEQNLNHDAMYWYRQDPGQGLRLIYYSQIVNDFQKGDIAEGYSVSREKKESFPLTVTSAQKNPTAFYLCASSISAGGDGYTFGSGTRLTVVEDLRNVTPPKVSLFEPSKAEIANKQKATLVCLARGFFPDHVELSWWVNGKEVHSGVCTDPQAYKESNYSYCLSSRLRVSATFWHNPRNHFRCQVQFHGLSEEDKWPEGSPKPVTQNISAEAWGRADCGITSASYQQGVLSATILYEILLGKATLYAVLVSTLVVMAMVKRKNS

SEQ ID NO: 2161 - protein, 5 aa, synthetic construct
MNHEY

SEQ ID NO: 2162 - protein, 6 aa, synthetic construct
SVGAGI

SEQ ID NO: 2163 - protein, 12 aa, synthetic construct
ASSYRESHYGYT

SEQ ID NO: 2164 - protein, 111 aa, synthetic construct
GVTQTPKFQVLKTGQSMTLQCAQDMNHEYMSWYRQDPGMGLRLIHYSVGAGITDQGEVPNGYNVSRSTTEDFPLRLLSAAPSQTSVYFCASSYRESHYGYTFGSGTRLTVV

SEQ ID NO: 2165 - protein, 113 aa, synthetic construct
NAGVTQTPKFQVLKTGQSMTLQCAQDMNHEYMSWYRQDPGMGLRLIHYSVGAGITDQGEVPNGYNVSRSTTEDFPLRLLSAAPSQTSVYFCASSYRESHYGYTFGSGTRLTVV

SEQ ID NO: 2166 - protein, 132 aa, synthetic construct
  VARIANT 2: note = X can be any Amino Acid
MXIGLLCCAALSLLWAGPVNAGVTQTPKFQVLKTGQSMTLQCAQDMNHEYMSWYRQDPGMGLRLIHYSVGAGITDQGEVPNGYNVSRSTTEDFPLRLLSAAPSQTSVYFCASSYRESHYGYTFGSGTRLTVV

SEQ ID NO: 2167 - protein, 132 aa, synthetic construct; identical to SEQ ID NO: 2166
  VARIANT 2: note = X can be any Amino Acid

SEQ ID NO: 2168 - protein, 305 aa, synthetic construct
MSIGLLCCAALSLLWAGPVNAGVTQTPKFQVLKTGQSMTLQCAQDMNHEYMSWYRQDPGMGLRLIHYSVGAGITDQGEVPNGYNVSRSTTEDFPLRLLSAAPSQTSVYFCASSYRESHYGYTFGSGTRLTVVEDLRNVTPPKVSLFEPSKAEIANKQKATLVCLARGFFPDHVELSWWVNGKEVHSGVCTDPQAYKESNYSYCLSSRLRVSATFWHNPRNHFRCQVQFHGLSEEDKWPEGSPKPVTQNISAEAWGRADCGITSASYQQGVLSATILYEILLGKATLYAVLVSTLVVMAMVKRKNS

SEQ ID NO: 2169 - protein, 305 aa, synthetic construct
MAIGLLCCAALSLLWAGPVNAGVTQTPKFQVLKTGQSMTLQCAQDMNHEYMSWYRQDPGMGLRLIHYSVGAGITDQGEVPNGYNVSRSTTEDFPLRLLSAAPSQTSVYFCASSYRESHYGYTFGSGTRLTVVEDLRNVTPPKVSLFEPSKAEIANKQKATLVCLARGFFPDHVELSWWVNGKEVHSGVCTDPQAYKESNYSYCLSSRLRVSATFWHNPRNHFRCQVQFHGLSEEDKWPEGSPKPVTQNISAEAWGRADCGITSASYQQGVLSATILYEILLGKATLYAVLVSTLVVMAMVKRKNS

SEQ ID NO: 2170 - protein, 305 aa, synthetic construct
MHIGLLCCAALSLLWAGPVNAGVTQTPKFQVLKTGQSMTLQCAQDMNHEYMSWYRQDPGMGLRLIHYSVGAGITDQGEVPNGYNVSRSTTEDFPLRLLSAAPSQTSVYFCASSYRESHYGYTFGSGTRLTVVEDLRNVTPPKVSLFEPSKAEIANKQKATLVCLARGFFPDHVELSWWVNGKEVHSGVCTDPQAYKESNYSYCLSSRLRVSATFWHNPRNHFRCQVQFHGLSEEDKWPEGSPKPVTQNISAEAWGRADCGITSASYQQGVLSATILYEILLGKATLYAVLVSTLVVMAMVKRKNS

SEQ ID NO: 2171 - protein, 5 aa, synthetic construct
SGHAT

SEQ ID NO: 2172 - protein, 6 aa, synthetic construct
FQNNGV

SEQ ID NO: 2173 - protein, 10 aa, synthetic construct
ASSLVNTEAF

SEQ ID NO: 2174 - protein, 110 aa, synthetic construct
GVAQSPRYKIIEKRQSVAFWCNPISGHATLYWYQQILGQGPKLLIQFQNNGVVDDSQLPKDRFSAERLKGVDSTLKIQPAKLEDSAVYLCASSLVNTEAFFGQGTRLTVV

SEQ ID NO: 2175 - protein, 112 aa, synthetic construct
EAGVAQSPRYKIIEKRQSVAFWCNPISGHATLYWYQQILGQGPKLLIQFQNNGVVDDSQLPKDRFSAERLKGVDSTLKIQPAKLEDSAVYLCASSLVNTEAFFGQGTRLTVV

SEQ ID NO: 2176 - protein, 131 aa, synthetic construct
  VARIANT 2: note = X can be any Amino Acid
MXTRLLCWAALCLLGAELTEAGVAQSPRYKIIEKRQSVAFWCNPISGHATLYWYQQILGQGPKLLIQFQNNGVVDDSQLPKDRFSAERLKGVDSTLKIQPAKLEDSAVYLCASSLVNTEAFFGQGTRLTVV

SEQ ID NO: 2177 - protein, 131 aa, synthetic construct; identical to SEQ ID NO: 2176
  VARIANT 2: note = X can be any Amino Acid

SEQ ID NO: 2178 - protein, 304 aa, synthetic construct
MGTRLLCWAALCLLGAELTEAGVAQSPRYKIIEKRQSVAFWCNPISGHATLYWYQQILGQGPKLLIQFQNNGVVDDSQLPKDRFSAERLKGVDSTLKIQPAKLEDSAVYLCASSLVNTEAFFGQGTRLTVVEDLRNVTPPKVSLFEPSKAEIANKQKATLVCLARGFFPDHVELSWWVNGKEVHSGVCTDPQAYKESNYSYCLSSRLRVSATFWHNPRNHFRCQVQFHGLSEEDKWPEGSPKPVTQNISAEAWGRADCGITSASYQQGVLSATILYEILLGKATLYAVLVSTLVVMAMVKRKNS

SEQ ID NO: 2179 - protein, 304 aa, synthetic construct
MATRLLCWAALCLLGAELTEAGVAQSPRYKIIEKRQSVAFWCNPISGHATLYWYQQILGQGPKLLIQFQNNGVVDDSQLPKDRFSAERLKGVDSTLKIQPAKLEDSAVYLCASSLVNTEAFFGQGTRLTVVEDLRNVTPPKVSLFEPSKAEIANKQKATLVCLARGFFPDHVELSWWVNGKEVHSGVCTDPQAYKESNYSYCLSSRLRVSATFWHNPRNHFRCQVQFHGLSEEDKWPEGSPKPVTQNISAEAWGRADCGITSASYQQGVLSATILYEILLGKATLYAVLVSTLVVMAMVKRKNS

SEQ ID NO: 2180 - protein, 304 aa, synthetic construct
MHTRLLCWAALCLLGAELTEAGVAQSPRYKIIEKRQSVAFWCNPISGHATLYWYQQILGQGPKLLIQFQNNGVVDDSQLPKDRFSAERLKGVDSTLKIQPAKLEDSAVYLCASSLVNTEAFFGQGTRLTVVEDLRNVTPPKVSLFEPSKAEIANKQKATLVCLARGFFPDHVELSWWVNGKEVHSGVCTDPQAYKESNYSYCLSSRLRVSATFWHNPRNHFRCQVQFHGLSEEDKWPEGSPKPVTQNISAEAWGRADCGITSASYQQGVLSATILYEILLGKATLYAVLVSTLVVMAMVKRKNS

SEQ ID NO: 2181 - protein, 5 aa, synthetic construct
LNHNV

SEQ ID NO: 2182 - protein, 6 aa, synthetic construct
YYDKDF

SEQ ID NO: 2183 - protein, 12 aa, synthetic construct
ATSRELRGNEQF

SEQ ID NO: 2184 - protein, 113 aa, synthetic construct
DAMVIQNPRYQVTQFGKPVTLSCSQTLNHNVMYWYQQKSSQAPKLLFHYYDKDFNNEADTPDNFQSRRPNTSFCFLDIRSPGLGDAAMYLCATSRELRGNEQFFGPGTRLTVL

SEQ ID NO: 2185 - protein, 113 aa, synthetic construct; identical to SEQ ID NO: 2184

SEQ ID NO: 2186 - protein, 132 aa, synthetic construct
  VARIANT 2: note = X can be any Amino Acid
MXPGLLHWMALCLLGTGHGDAMVIQNPRYQVTQFGKPVTLSCSQTLNHNVMYWYQQKSSQAPKLLFHYYDKDFNNEADTPDNFQSRRPNTSFCFLDIRSPGLGDAAMYLCATSRELRGNEQFFGPGTRLTVL

SEQ ID NO: 2187 - protein, 132 aa, synthetic construct; identical to SEQ ID NO: 2186
  VARIANT 2: note = X can be any Amino Acid

SEQ ID NO: 2188 - protein, 305 aa, synthetic construct
MGPGLLHWMALCLLGTGHGDAMVIQNPRYQVTQFGKPVTLSCSQTLNHNVMYWYQQKSSQAPKLLFHYYDKDFNNEADTPDNFQSRRPNTSFCFLDIRSPGLGDAAMYLCATSRELRGNEQFFGPGTRLTVLEDLRNVTPPKVSLFEPSKAEIANKQKATLVCLARGFFPDHVELSWWVNGKEVHSGVCTDPQAYKESNYSYCLSSRLRVSATFWHNPRNHFRCQVQFHGLSEEDKWPEGSPKPVTQNISAEAWGRADCGITSASYQQGVLSATILYEILLGKATLYAVLVSTLVVMAMVKRKNS

SEQ ID NO: 2189 - protein, 305 aa, synthetic construct
MAPGLLHWMALCLLGTGHGDAMVIQNPRYQVTQFGKPVTLSCSQTLNHNVMYWYQQKSSQAPKLLFHYYDKDFNNEADTPDNFQSRRPNTSFCFLDIRSPGLGDAAMYLCATSRELRGNEQFFGPGTRLTVLEDLRNVTPPKVSLFEPSKAEIANKQKATLVCLARGFFPDHVELSWWVNGKEVHSGVCTDPQAYKESNYSYCLSSRLRVSATFWHNPRNHFRCQVQFHGLSEEDKWPEGSPKPVTQNISAEAWGRADCGITSASYQQGVLSATILYEILLGKATLYAVLVSTLVVMAMVKRKNS

SEQ ID NO: 2190 - protein, 305 aa, synthetic construct
MHPGLLHWMALCLLGTGHGDAMVIQNPRYQVTQFGKPVTLSCSQTLNHNVMYWYQQKSSQAPKLLFHYYDKDFNNEADTPDNFQSRRPNTSFCFLDIRSPGLGDAAMYLCATSRELRGNEQFFGPGTRLTVLEDLRNVTPPKVSLFEPSKAEIANKQKATLVCLARGFFPDHVELSWWVNGKEVHSGVCTDPQAYKESNYSYCLSSRLRVSATFWHNPRNHFRCQVQFHGLSEEDKWPEGSPKPVTQNISAEAWGRADCGITSASYQQGVLSATILYEILLGKATLYAVLVSTLVVMAMVKRKNS

SEQ ID NO: 2191 - protein, 6 aa, synthetic construct
DFQATT

SEQ ID NO: 2192 - protein, 7 aa, synthetic construct
SNEGSKA

SEQ ID NO: 2193 - protein, 11 aa, synthetic construct
SAAGQANTEAF

SEQ ID NO: 2194 - protein, 119 aa, synthetic construct
GSGLGAVVSQHPSWVICKSGTSVKIECRSLDFQATTMFWYRQFPKQSLMLMATSNEGSKATYEQGVEKDKFLINHASLTLSTLTVTSAHPEDSSFYICSAAGQANTEAFFGQGTRLTVV

SEQ ID NO: 2195 - protein, 115 aa, synthetic construct
GAVVSQHPSWVICKSGTSVKIECRSLDFQATTMFWYRQFPKQSLMLMATSNEGSKATYEQGVEKDKFLINHASLTLSTLTVTSAHPEDSSFYICSAAGQANTEAFFGQGTRLTVV

SEQ ID NO: 2196 - protein, 140 aa, synthetic construct
  VARIANT 2: note = X can be any Amino Acid
MXLLLLLLGPGISLLLPGSLAGSGLGAVVSQHPSWVICKSGTSVKIECRSLDFQATTMFWYRQFPKQSLMLMATSNEGSKATYEQGVEKDKFLINHASLTLSTLTVTSAHPEDSSFYICSAAGQANTEAFFGQGTRLTVV

SEQ ID NO: 2197 - protein, 140 aa, synthetic construct; identical to SEQ ID NO: 2196
  VARIANT 2: note = X can be any Amino Acid

SEQ ID NO: 2198 - protein, 313 aa, synthetic construct
MLLLLLLLGPGISLLLPGSLAGSGLGAVVSQHPSWVICKSGTSVKIECRSLDFQATTMFWYRQFPKQSLMLMATSNEGSKATYEQGVEKDKFLINHASLTLSTLTVTSAHPEDSSFYICSAAGQANTEAFFGQGTRLTVVEDLRNVTPPKVSLFEPSKAEIANKQKATLVCLARGFFPDHVELSWWVNGKEVHSGVCTDPQAYKESNYSYCLSSRLRVSATFWHNPRNHFRCQVQFHGLSEEDKWPEGSPKPVTQNISAEAWGRADCGITSASYQQGVLSATILYEILLGKATLYAVLVSTLVVMAMVKRKNS

SEQ ID NO: 2199 - protein, 313 aa, synthetic construct
MALLLLLLGPGISLLLPGSLAGSGLGAVVSQHPSWVICKSGTSVKIECRSLDFQATTMFWYRQFPKQSLMLMATSNEGSKATYEQGVEKDKFLINHASLTLSTLTVTSAHPEDSSFYICSAAGQANTEAFFGQGTRLTVVEDLRNVTPPKVSLFEPSKAEIANKQKATLVCLARGFFPDHVELSWWVNGKEVHSGVCTDPQAYKESNYSYCLSSRLRVSATFWHNPRNHFRCQVQFHGLSEEDKWPEGSPKPVTQNISAEAWGRADCGITSASYQQGVLSATILYEILLGKATLYAVLVSTLVVMAMVKRKNS

SEQ ID NO: 2200 - protein, 313 aa, synthetic construct
MHLLLLLLGPGISLLLPGSLAGSGLGAVVSQHPSWVICKSGTSVKIECRSLDFQATTMFWYRQFPKQSLMLMATSNEGSKATYEQGVEKDKFLINHASLTLSTLTVTSAHPEDSSFYICSAAGQANTEAFFGQGTRLTVVEDLRNVTPPKVSLFEPSKAEIANKQKATLVCLARGFFPDHVELSWWVNGKEVHSGVCTDPQAYKESNYSYCLSSRLRVSATFWHNPRNHFRCQVQFHGLSEEDKWPEGSPKPVTQNISAEAWGRADCGITSASYQQGVLSATILYEILLGKATLYAVLVSTLVVMAMVKRKNS

SEQ ID NO: 2201 - protein, 5 aa, synthetic construct
SGDLS

SEQ ID NO: 2202 - protein, 6 aa, synthetic construct
YYNGEE

SEQ ID NO: 2203 - protein, 14 aa, synthetic construct
ASSVGSSSSTDTQY

SEQ ID NO: 2204 - protein, 113 aa, synthetic construct
GVTQTPKHLITATGQRVTLRCSPRSGDLSVYWYQQSLDQGLQFLIQYYNGEERAKGNILERFSAQQFPDLHSELNLSSLELGDSALYFCASSVGSSSSTDTQYFGPGTRLTVL

SEQ ID NO: 2205 - protein, 115 aa, synthetic construct
DSGVTQTPKHLITATGQRVTLRCSPRSGDLSVYWYQQSLDQGLQFLIQYYNGEERAKGNILERFSAQQFPDLHSELNLSSLELGDSALYFCASSVGSSSSTDTQYFGPGTRLTVL

SEQ ID NO: 2206 - protein, 135 aa, synthetic construct
  VARIANT 2: note = X can be any Amino Acid
MXHFRLLCCVAFCLLGAGPVDSGVTQTPKHLITATGQRVTLRCSPRSGDLSVYWYQQSLDQGLQFLIQYYNGEERAKGNILERFSAQQFPDLHSELNLSSLELGDSALYFCASSVGSSSSTDTQYFGPGTRLTVL

SEQ ID NO: 2207 - protein, 135 aa, synthetic construct; identical to SEQ ID NO: 2206
  VARIANT 2: note = X can be any Amino Acid

SEQ ID NO: 2208 - protein, 307 aa, synthetic construct
MGFRLLCCVAFCLLGAGPVDSGVTQTPKHLITATGQRVTLRCSPRSGDLSVYWYQQSLDQGLQFLIQYYNGEERAKGNILERFSAQQFPDLHSELNLSSLELGDSALYFCASSVGSSSSTDTQYFGPGTRLTVLEDLRNVTPPKVSLFEPSKAEIANKQKATLVCLARGFFPDHVELSWWVNGKEVHSGVCTDPQAYKESNYSYCLSSRLRVSATFWHNPRNHFRCQVQFHGLSEEDKWPEGSPKPVTQNISAEAWGRADCGITSASYQQGVLSATILYEILLGKATLYAVLVSTLVVMAMVKRKNS

SEQ ID NO: 2209 - protein, 307 aa, synthetic construct
MAFRLLCCVAFCLLGAGPVDSGVTQTPKHLITATGQRVTLRCSPRSGDLSVYWYQQSLDQGLQFLIQYYNGEERAKGNILERFSAQQFPDLHSELNLSSLELGDSALYFCASSVGSSSSTDTQYFGPGTRLTVLEDLRNVTPPKVSLFEPSKAEIANKQKATLVCLARGFFPDHVELSWWVNGKEVHSGVCTDPQAYKESNYSYCLSSRLRVSATFWHNPRNHFRCQVQFHGLSEEDKWPEGSPKPVTQNISAEAWGRADCGITSASYQQGVLSATILYEILLGKATLYAVLVSTLVVMAMVKRKNS

SEQ ID NO: 2210 - protein, 307 aa, synthetic construct
MHFRLLCCVAFCLLGAGPVDSGVTQTPKHLITATGQRVTLRCSPRSGDLSVYWYQQSLDQGLQFLIQYYNGEERAKGNILERFSAQQFPDLHSELNLSSLELGDSALYFCASSVGSSSSTDTQYFGPGTRLTVLEDLRNVTPPKVSLFEPSKAEIANKQKATLVCLARGFFPDHVELSWWVNGKEVHSGVCTDPQAYKESNYSYCLSSRLRVSATFWHNPRNHFRCQVQFHGLSEEDKWPEGSPKPVTQNISAEAWGRADCGITSASYQQGVLSATILYEILLGKATLYAVLVSTLVVMAMVKRKNS

SEQ ID NO: 2211-2220 - skipped (10 entries)

SEQ ID NO: 2221 - protein, 6 aa, synthetic construct
DFQATT

SEQ ID NO: 2222 - protein, 7 aa, synthetic construct
SNEGSKA

SEQ ID NO: 2223 - protein, 12 aa, synthetic construct
SGGLEEAARQFI

SEQ ID NO: 2224 - protein, 119 aa, synthetic construct
GSGLGAVVSQHPSWVICKSGTSVKIECRSLDFQATTMFWYRQFPKQSLMLMATSNEGSKATYEQGVEKDKFLINHASLTLSTLTVTSAHPEDSSFYICSGGLEEAARQFIGPGTRLTVL

SEQ ID NO: 2225 - protein, 115 aa, synthetic construct
GAVVSQHPSWVICKSGTSVKIECRSLDFQATTMFWYRQFPKQSLMLMATSNEGSKATYEQGVEKDKFLINHASLTLSTLTVTSAHPEDSSFYICSGGLEEAARQFIGPGTRLTVL

SEQ ID NO: 2226 - protein, 140 aa, synthetic construct
  VARIANT 2: note = X can be any Amino Acid
MXLLLLLLGPGISLLLPGSLAGSGLGAVVSQHPSWVICKSGTSVKIECRSLDFQATTMFWYRQFPKQSLMLMATSNEGSKATYEQGVEKDKFLINHASLTLSTLTVTSAHPEDSSFYICSGGLEEAARQFIGPGTRLTVL

SEQ ID NO: 2227 - protein, 140 aa, synthetic construct; identical to SEQ ID NO: 2226
  VARIANT 2: note = X can be any Amino Acid

SEQ ID NO: 2228 - protein, 313 aa, synthetic construct
MLLLLLLLGPGISLLLPGSLAGSGLGAVVSQHPSWVICKSGTSVKIECRSLDFQATTMFWYRQFPKQSLMLMATSNEGSKATYEQGVEKDKFLINHASLTLSTLTVTSAHPEDSSFYICSGGLEEAARQFIGPGTRLTVLEDLRNVTPPKVSLFEPSKAEIANKQKATLVCLARGFFPDHVELSWWVNGKEVHSGVCTDPQAYKESNYSYCLSSRLRVSATFWHNPRNHFRCQVQFHGLSEEDKWPEGSPKPVTQNISAEAWGRADCGITSASYQQGVLSATILYEILLGKATLYAVLVSTLVVMAMVKRKNS

SEQ ID NO: 2229 - protein, 313 aa, synthetic construct
MALLLLLLGPGISLLLPGSLAGSGLGAVVSQHPSWVICKSGTSVKIECRSLDFQATTMFWYRQFPKQSLMLMATSNEGSKATYEQGVEKDKFLINHASLTLSTLTVTSAHPEDSSFYICSGGLEEAARQFIGPGTRLTVLEDLRNVTPPKVSLFEPSKAEIANKQKATLVCLARGFFPDHVELSWWVNGKEVHSGVCTDPQAYKESNYSYCLSSRLRVSATFWHNPRNHFRCQVQFHGLSEEDKWPEGSPKPVTQNISAEAWGRADCGITSASYQQGVLSATILYEILLGKATLYAVLVSTLVVMAMVKRKNS

SEQ ID NO: 2230 - protein, 313 aa, synthetic construct
MHLLLLLLGPGISLLLPGSLAGSGLGAVVSQHPSWVICKSGTSVKIECRSLDFQATTMFWYRQFPKQSLMLMATSNEGSKATYEQGVEKDKFLINHASLTLSTLTVTSAHPEDSSFYICSGGLEEAARQFIGPGTRLTVLEDLRNVTPPKVSLFEPSKAEIANKQKATLVCLARGFFPDHVELSWWVNGKEVHSGVCTDPQAYKESNYSYCLSSRLRVSATFWHNPRNHFRCQVQFHGLSEEDKWPEGSPKPVTQNISAEAWGRADCGITSASYQQGVLSATILYEILLGKATLYAVLVSTLVVMAMVKRKNS

SEQ ID NO: 2231 - protein, 6 aa, synthetic construct
DFQATT

SEQ ID NO: 2232 - protein, 7 aa, synthetic construct
SNEGSKA

SEQ ID NO: 2233 - protein, 12 aa, synthetic construct
SGGLEEAARQFI

SEQ ID NO: 2234 - protein, 114 aa, synthetic construct
AVVSQHPSRVICKSGTSVKIECRSLDFQATTMFWYRQFPKQSLMLMATSNEGSKATYEQGVEKDKFLINHASLTLSTLTVTSAHPEDSSFYICSGGLEEAARQFIGPGTRLTVL

SEQ ID NO: 2235 - protein, 115 aa, synthetic construct
GAVVSQHPSRVICKSGTSVKIECRSLDFQATTMFWYRQFPKQSLMLMATSNEGSKATYEQGVEKDKFLINHASLTLSTLTVTSAHPEDSSFYICSGGLEEAARQFIGPGTRLTVL

SEQ ID NO: 2236 - protein, 130 aa, synthetic construct
  VARIANT 2: note = X can be any Amino Acid
MXLLLLLLGPAGSGLGAVVSQHPSRVICKSGTSVKIECRSLDFQATTMFWYRQFPKQSLMLMATSNEGSKATYEQGVEKDKFLINHASLTLSTLTVTSAHPEDSSFYICSGGLEEAARQFIGPGTRLTVL

SEQ ID NO: 2237 - protein, 130 aa, synthetic construct; identical to SEQ ID NO: 2236
  VARIANT 2: note = X can be any Amino Acid

SEQ ID NO: 2238 - protein, 303 aa, synthetic construct
MLLLLLLLGPAGSGLGAVVSQHPSRVICKSGTSVKIECRSLDFQATTMFWYRQFPKQSLMLMATSNEGSKATYEQGVEKDKFLINHASLTLSTLTVTSAHPEDSSFYICSGGLEEAARQFIGPGTRLTVLEDLRNVTPPKVSLFEPSKAEIANKQKATLVCLARGFFPDHVELSWWVNGKEVHSGVCTDPQAYKESNYSYCLSSRLRVSATFWHNPRNHFRCQVQFHGLSEEDKWPEGSPKPVTQNISAEAWGRADCGITSASYQQGVLSATILYEILLGKATLYAVLVSTLVVMAMVKRKNS

SEQ ID NO: 2239 - protein, 303 aa, synthetic construct
MALLLLLLGPAGSGLGAVVSQHPSRVICKSGTSVKIECRSLDFQATTMFWYRQFPKQSLMLMATSNEGSKATYEQGVEKDKFLINHASLTLSTLTVTSAHPEDSSFYICSGGLEEAARQFIGPGTRLTVLEDLRNVTPPKVSLFEPSKAEIANKQKATLVCLARGFFPDHVELSWWVNGKEVHSGVCTDPQAYKESNYSYCLSSRLRVSATFWHNPRNHFRCQVQFHGLSEEDKWPEGSPKPVTQNISAEAWGRADCGITSASYQQGVLSATILYEILLGKATLYAVLVSTLVVMAMVKRKNS

SEQ ID NO: 2240 - protein, 303 aa, synthetic construct
MHLLLLLLGPAGSGLGAVVSQHPSRVICKSGTSVKIECRSLDFQATTMFWYRQFPKQSLMLMATSNEGSKATYEQGVEKDKFLINHASLTLSTLTVTSAHPEDSSFYICSGGLEEAARQFIGPGTRLTVLEDLRNVTPPKVSLFEPSKAEIANKQKATLVCLARGFFPDHVELSWWVNGKEVHSGVCTDPQAYKESNYSYCLSSRLRVSATFWHNPRNHFRCQVQFHGLSEEDKWPEGSPKPVTQNISAEAWGRADCGITSASYQQGVLSATILYEILLGKATLYAVLVSTLVVMAMVKRKNS

SEQ ID NO: 2241 - protein, 5 aa, synthetic construct
MDHEN

SEQ ID NO: 2242 - protein, 6 aa, synthetic construct
SYDVKM

SEQ ID NO: 2243 - protein, 14 aa, synthetic construct
ASSFGTGSIQETQY

SEQ ID NO: 2244 - protein, 108 aa, synthetic construct
SRYLVKRTGEKVFLECVQDMDHENMFWYRQDPGLGLRLIYFSYDVKMKEKGDIPEGYSVSREKKERFSLILESASTNQTSMYLCASSFGTGSIQETQYFGPGTRLLVL

SEQ ID NO: 2245 - protein, 115 aa, synthetic construct
DVKVTQSSRYLVKRTGEKVFLECVQDMDHENMFWYRQDPGLGLRLIYFSYDVKMKEKGDIPEGYSVSREKKERFSLILESASTNQTSMYLCASSFGTGSIQETQYFGPGTRLLVL

SEQ ID NO: 2246 - protein, 134 aa, synthetic construct
  VARIANT 2: note = X can be any Amino Acid
MXIRLLCRVAFCFLAVGLVDVKVTQSSRYLVKRTGEKVFLECVQDMDHENMFWYRQDPGLGLRLIYFSYDVKMKEKGDIPEGYSVSREKKERFSLILESASTNQTSMYLCASSFGTGSIQETQYFGPGTRLLVL

SEQ ID NO: 2247 - protein, 134 aa, synthetic construct; identical to SEQ ID NO: 2246
  VARIANT 2: note = X can be any Amino Acid

SEQ ID NO: 2248 - protein, 307 aa, synthetic construct
MGIRLLCRVAFCFLAVGLVDVKVTQSSRYLVKRTGEKVFLECVQDMDHENMFWYRQDPGLGLRLIYFSYDVKMKEKGDIPEGYSVSREKKERFSLILESASTNQTSMYLCASSFGTGSIQETQYFGPGTRLLVLEDLRNVTPPKVSLFEPSKAEIANKQKATLVCLARGFFPDHVELSWWVNGKEVHSGVCTDPQAYKESNYSYCLSSRLRVSATFWHNPRNHFRCQVQFHGLSEEDKWPEGSPKPVTQNISAEAWGRADCGITSASYQQGVLSATILYEILLGKATLYAVLVSTLVVMAMVKRKNS

SEQ ID NO: 2249 - protein, 307 aa, synthetic construct
MAIRLLCRVAFCFLAVGLVDVKVTQSSRYLVKRTGEKVFLECVQDMDHENMFWYRQDPGLGLRLIYFSYDVKMKEKGDIPEGYSVSREKKERFSLILESASTNQTSMYLCASSFGTGSIQETQYFGPGTRLLVLEDLRNVTPPKVSLFEPSKAEIANKQKATLVCLARGFFPDHVELSWWVNGKEVHSGVCTDPQAYKESNYSYCLSSRLRVSATFWHNPRNHFRCQVQFHGLSEEDKWPEGSPKPVTQNISAEAWGRADCGITSASYQQGVLSATILYEILLGKATLYAVLVSTLVVMAMVKRKNS

SEQ ID NO: 2250 - protein, 307 aa, synthetic construct
MHIRLLCRVAFCFLAVGLVDVKVTQSSRYLVKRTGEKVFLECVQDMDHENMFWYRQDPGLGLRLIYFSYDVKMKEKGDIPEGYSVSREKKERFSLILESASTNQTSMYLCASSFGTGSIQETQYFGPGTRLLVLEDLRNVTPPKVSLFEPSKAEIANKQKATLVCLARGFFPDHVELSWWVNGKEVHSGVCTDPQAYKESNYSYCLSSRLRVSATFWHNPRNHFRCQVQFHGLSEEDKWPEGSPKPVTQNISAEAWGRADCGITSASYQQGVLSATILYEILLGKATLYAVLVSTLVVMAMVKRKNS

SEQ ID NO: 2251 - protein, 5 aa, synthetic construct
SGHTS

SEQ ID NO: 2252 - protein, 6 aa, synthetic construct
YDEGEE

SEQ ID NO: 2253 - protein, 18 aa, synthetic construct
ASSSPGATSGGANTGELF

SEQ ID NO: 2254 - protein, 117 aa, synthetic construct
GVTQSPTHLIKTRGQQATLRCSPISGHTSVYWYQQALGLGLQFLLWYDEGEERNRGNFPPRFSGRQFPNYSSELNVNALELEDSALYLCASSSPGATSGGANTGELFFGEGSRLTVL

SEQ ID NO: 2255 - protein, 119 aa, synthetic construct
EAGVTQSPTHLIKTRGQQATLRCSPISGHTSVYWYQQALGLGLQFLLWYDEGEERNRGNFPPRFSGRQFPNYSSELNVNALELEDSALYLCASSSPGATSGGANTGELFFGEGSRLTVL

SEQ ID NO: 2256 - protein, 138 aa, synthetic construct
  VARIANT 2: note = X can be any Amino Acid
MXPRLLFWALLCLLGTGPVEAGVTQSPTHLIKTRGQQATLRCSPISGHTSVYWYQQALGLGLQFLLWYDEGEERNRGNFPPRFSGRQFPNYSSELNVNALELEDSALYLCASSSPGATSGGANTGELFFGEGSRLTVL

SEQ ID NO: 2257 - protein, 138 aa, synthetic construct; identical to SEQ ID NO: 2256
  VARIANT 2: note = X can be any Amino Acid

SEQ ID NO: 2258 - protein, 311 aa, synthetic construct
MGPRLLFWALLCLLGTGPVEAGVTQSPTHLIKTRGQQATLRCSPISGHTSVYWYQQALGLGLQFLLWYDEGEERNRGNFPPRFSGRQFPNYSSELNVNALELEDSALYLCASSSPGATSGGANTGELFFGEGSRLTVLEDLRNVTPPKVSLFEPSKAEIANKQKATLVCLARGFFPDHVELSWWVNGKEVHSGVCTDPQAYKESNYSYCLSSRLRVSATFWHNPRNHFRCQVQFHGLSEEDKWPEGSPKPVTQNISAEAWGRADCGITSASYQQGVLSATILYEILLGKATLYAVLVSTLVVMAMVKRKNS

SEQ ID NO: 2259 - protein, 311 aa, synthetic construct
MAPRLLFWALLCLLGTGPVEAGVTQSPTHLIKTRGQQATLRCSPISGHTSVYWYQQALGLGLQFLLWYDEGEERNRGNFPPRFSGRQFPNYSSELNVNALELEDSALYLCASSSPGATSGGANTGELFFGEGSRLTVLEDLRNVTPPKVSLFEPSKAEIANKQKATLVCLARGFFPDHVELSWWVNGKEVHSGVCTDPQAYKESNYSYCLSSRLRVSATFWHNPRNHFRCQVQFHGLSEEDKWPEGSPKPVTQNISAEAWGRADCGITSASYQQGVLSATILYEILLGKATLYAVLVSTLVVMAMVKRKNS

SEQ ID NO: 2260 - protein, 311 aa, synthetic construct
MHPRLLFWALLCLLGTGPVEAGVTQSPTHLIKTRGQQATLRCSPISGHTSVYWYQQALGLGLQFLLWYDEGEERNRGNFPPRFSGRQFPNYSSELNVNALELEDSALYLCASSSPGATSGGANTGELFFGEGSRLTVLEDLRNVTPPKVSLFEPSKAEIANKQKATLVCLARGFFPDHVELSWWVNGKEVHSGVCTDPQAYKESNYSYCLSSRLRVSATFWHNPRNHFRCQVQFHGLSEEDKWPEGSPKPVTQNISAEAWGRADCGITSASYQQGVLSATILYEILLGKATLYAVLVSTLVVMAMVKRKNS

SEQ ID NO: 2261 - protein, 6 aa, synthetic construct
DFQATT

SEQ ID NO: 2262 - protein, 7 aa, synthetic construct
SNEGSKA

SEQ ID NO: 2263 - protein, 12 aa, synthetic construct
SARDLQRSYEQY

SEQ ID NO: 2264 - protein, 120 aa, synthetic construct
GSGLGAVVSQHPSWVICKSGTSVKIECRSLDFQATTMFWYRQFPKQSLMLMATSNEGSKATYEQGVEKDKFLINHASLTLSTLTVTSAHPEDSSFYICSARDLQRSYEQYFGPGTRLTVT

SEQ ID NO: 2265 - protein, 116 aa, synthetic construct
GAVVSQHPSWVICKSGTSVKIECRSLDFQATTMFWYRQFPKQSLMLMATSNEGSKATYEQGVEKDKFLINHASLTLSTLTVTSAHPEDSSFYICSARDLQRSYEQYFGPGTRLTVT

SEQ ID NO: 2266 - protein, 141 aa, synthetic construct
  VARIANT 2: note = X can be any Amino Acid
MXLLLLLLGPGISLLLPGSLAGSGLGAVVSQHPSWVICKSGTSVKIECRSLDFQATTMFWYRQFPKQSLMLMATSNEGSKATYEQGVEKDKFLINHASLTLSTLTVTSAHPEDSSFYICSARDLQRSYEQYFGPGTRLTVT

SEQ ID NO: 2267 - protein, 141 aa, synthetic construct; identical to SEQ ID NO: 2266
  VARIANT 2: note = X can be any Amino Acid

SEQ ID NO: 2268 - protein, 314 aa, synthetic construct
MLLLLLLLGPGISLLLPGSLAGSGLGAVVSQHPSWVICKSGTSVKIECRSLDFQATTMFWYRQFPKQSLMLMATSNEGSKATYEQGVEKDKFLINHASLTLSTLTVTSAHPEDSSFYICSARDLQRSYEQYFGPGTRLTVTEDLRNVTPPKVSLFEPSKAEIANKQKATLVCLARGFFPDHVELSWWVNGKEVHSGVCTDPQAYKESNYSYCLSSRLRVSATFWHNPRNHFRCQVQFHGLSEEDKWPEGSPKPVTQNISAEAWGRADCGITSASYQQGVLSATILYEILLGKATLYAVLVSTLVVMAMVKRKNS

SEQ ID NO: 2269 - protein, 314 aa, synthetic construct
MALLLLLLGPGISLLLPGSLAGSGLGAVVSQHPSWVICKSGTSVKIECRSLDFQATTMFWYRQFPKQSLMLMATSNEGSKATYEQGVEKDKFLINHASLTLSTLTVTSAHPEDSSFYICSARDLQRSYEQYFGPGTRLTVTEDLRNVTPPKVSLFEPSKAEIANKQKATLVCLARGFFPDHVELSWWVNGKEVHSGVCTDPQAYKESNYSYCLSSRLRVSATFWHNPRNHFRCQVQFHGLSEEDKWPEGSPKPVTQNISAEAWGRADCGITSASYQQGVLSATILYEILLGKATLYAVLVSTLVVMAMVKRKNS

SEQ ID NO: 2270 - protein, 314 aa, synthetic construct
MHLLLLLLGPGISLLLPGSLAGSGLGAVVSQHPSWVICKSGTSVKIECRSLDFQATTMFWYRQFPKQSLMLMATSNEGSKATYEQGVEKDKFLINHASLTLSTLTVTSAHPEDSSFYICSARDLQRSYEQYFGPGTRLTVTEDLRNVTPPKVSLFEPSKAEIANKQKATLVCLARGFFPDHVELSWWVNGKEVHSGVCTDPQAYKESNYSYCLSSRLRVSATFWHNPRNHFRCQVQFHGLSEEDKWPEGSPKPVTQNISAEAWGRADCGITSASYQQGVLSATILYEILLGKATLYAVLVSTLVVMAMVKRKNS

SEQ ID NO: 2271 - protein, 6 aa, synthetic construct
DFQATT

SEQ ID NO: 2272 - protein, 7 aa, synthetic construct
SNEGSKA

SEQ ID NO: 2273 - protein, 12 aa, synthetic construct
SARDLQRSYEQY

SEQ ID NO: 2274 - protein, 115 aa, synthetic construct
AVVSQHPSRVICKSGTSVKIECRSLDFQATTMFWYRQFPKQSLMLMATSNEGSKATYEQGVEKDKFLINHASLTLSTLTVTSAHPEDSSFYICSARDLQRSYEQYFGPGTRLTVT

SEQ ID NO: 2275 - protein, 116 aa, synthetic construct
GAVVSQHPSRVICKSGTSVKIECRSLDFQATTMFWYRQFPKQSLMLMATSNEGSKATYEQGVEKDKFLINHASLTLSTLTVTSAHPEDSSFYICSARDLQRSYEQYFGPGTRLTVT

SEQ ID NO: 2276 - protein, 131 aa, synthetic construct
  VARIANT 2: note = X can be any Amino Acid
MXLLLLLLGPAGSGLGAVVSQHPSRVICKSGTSVKIECRSLDFQATTMFWYRQFPKQSLMLMATSNEGSKATYEQGVEKDKFLINHASLTLSTLTVTSAHPEDSSFYICSARDLQRSYEQYFGPGTRLTVT

SEQ ID NO: 2277 - protein, 131 aa, synthetic construct; identical to SEQ ID NO: 2276
  VARIANT 2: note = X can be any Amino Acid

SEQ ID NO: 2278 - protein, 304 aa, synthetic construct
MLLLLLLLGPAGSGLGAVVSQHPSRVICKSGTSVKIECRSLDFQATTMFWYRQFPKQSLMLMATSNEGSKATYEQGVEKDKFLINHASLTLSTLTVTSAHPEDSSFYICSARDLQRSYEQYFGPGTRLTVTEDLRNVTPPKVSLFEPSKAEIANKQKATLVCLARGFFPDHVELSWWVNGKEVHSGVCTDPQAYKESNYSYCLSSRLRVSATFWHNPRNHFRCQVQFHGLSEEDKWPEGSPKPVTQNISAEAWGRADCGITSASYQQGVLSATILYEILLGKATLYAVLVSTLVVMAMVKRKNS

SEQ ID NO: 2279 - protein, 304 aa, synthetic construct
MALLLLLLGPAGSGLGAVVSQHPSRVICKSGTSVKIECRSLDFQATTMFWYRQFPKQSLMLMATSNEGSKATYEQGVEKDKFLINHASLTLSTLTVTSAHPEDSSFYICSARDLQRSYEQYFGPGTRLTVTEDLRNVTPPKVSLFEPSKAEIANKQKATLVCLARGFFPDHVELSWWVNGKEVHSGVCTDPQAYKESNYSYCLSSRLRVSATFWHNPRNHFRCQVQFHGLSEEDKWPEGSPKPVTQNISAEAWGRADCGITSASYQQGVLSATILYEILLGKATLYAVLVSTLVVMAMVKRKNS

SEQ ID NO: 2280 - protein, 304 aa, synthetic construct
MHLLLLLLGPAGSGLGAVVSQHPSRVICKSGTSVKIECRSLDFQATTMFWYRQFPKQSLMLMATSNEGSKATYEQGVEKDKFLINHASLTLSTLTVTSAHPEDSSFYICSARDLQRSYEQYFGPGTRLTVTEDLRNVTPPKVSLFEPSKAEIANKQKATLVCLARGFFPDHVELSWWVNGKEVHSGVCTDPQAYKESNYSYCLSSRLRVSATFWHNPRNHFRCQVQFHGLSEEDKWPEGSPKPVTQNISAEAWGRADCGITSASYQQGVLSATILYEILLGKATLYAVLVSTLVVMAMVKRKNS

SEQ ID NO: 2281 - protein, 5 aa, synthetic construct
SGHKS

SEQ ID NO: 2282 - protein, 7 aa, synthetic construct
QYYEKEE

SEQ ID NO: 2283 - protein, 14 aa, synthetic construct
ASSGGRTSGAYEQF

SEQ ID NO: 2284 - protein, 113 aa, synthetic construct
GVTQSPTHLIKTRGQQVTLRCSPISGHKSVSWYQQVLGQGPQFIFQYYEKEERGRGNFPDRFSARQFPNYSSELNVNALLLGDSALYLCASSGGRTSGAYEQFFGPGTRLTVL

SEQ ID NO: 2285 - protein, 115 aa, synthetic construct
DAGVTQSPTHLIKTRGQQVTLRCSPISGHKSVSWYQQVLGQGPQFIFQYYEKEERGRGNFPDRFSARQFPNYSSELNVNALLLGDSALYLCASSGGRTSGAYEQFFGPGTRLTVL

SEQ ID NO: 2286 - protein, 134 aa, synthetic construct
  VARIANT 2: note = X can be any Amino Acid
MXPGLLCWVLLCLLGAGPVDAGVTQSPTHLIKTRGQQVTLRCSPISGHKSVSWYQQVLGQGPQFIFQYYEKEERGRGNFPDRFSARQFPNYSSELNVNALLLGDSALYLCASSGGRTSGAYEQFFGPGTRLTVL

SEQ ID NO: 2287 - protein, 134 aa, synthetic construct; identical to SEQ ID NO: 2286
  VARIANT 2: note = X can be any Amino Acid

SEQ ID NO: 2288 - protein, 307 aa, synthetic construct
MGPGLLCWVLLCLLGAGPVDAGVTQSPTHLIKTRGQQVTLRCSPISGHKSVSWYQQVLGQGPQFIFQYYEKEERGRGNFPDRFSARQFPNYSSELNVNALLLGDSALYLCASSGGRTSGAYEQFFGPGTRLTVLEDLRNVTPPKVSLFEPSKAEIANKQKATLVCLARGFFPDHVELSWWVNGKEVHSGVCTDPQAYKESNYSYCLSSRLRVSATFWHNPRNHFRCQVQFHGLSEEDKWPEGSPKPVTQNISAEAWGRADCGITSASYQQGVLSATILYEILLGKATLYAVLVSTLVVMAMVKRKNS

SEQ ID NO: 2289 - protein, 307 aa, synthetic construct
MAPGLLCWVLLCLLGAGPVDAGVTQSPTHLIKTRGQQVTLRCSPISGHKSVSWYQQVLGQGPQFIFQYYEKEERGRGNFPDRFSARQFPNYSSELNVNALLLGDSALYLCASSGGRTSGAYEQFFGPGTRLTVLEDLRNVTPPKVSLFEPSKAEIANKQKATLVCLARGFFPDHVELSWWVNGKEVHSGVCTDPQAYKESNYSYCLSSRLRVSATFWHNPRNHFRCQVQFHGLSEEDKWPEGSPKPVTQNISAEAWGRADCGITSASYQQGVLSATILYEILLGKATLYAVLVSTLVVMAMVKRKNS

SEQ ID NO: 2290 - protein, 307 aa, synthetic construct
MHPGLLCWVLLCLLGAGPVDAGVTQSPTHLIKTRGQQVTLRCSPISGHKSVSWYQQVLGQGPQFIFQYYEKEERGRGNFPDRFSARQFPNYSSELNVNALLLGDSALYLCASSGGRTSGAYEQFFGPGTRLTVLEDLRNVTPPKVSLFEPSKAEIANKQKATLVCLARGFFPDHVELSWWVNGKEVHSGVCTDPQAYKESNYSYCLSSRLRVSATFWHNPRNHFRCQVQFHGLSEEDKWPEGSPKPVTQNISAEAWGRADCGITSASYQQGVLSATILYEILLGKATLYAVLVSTLVVMAMVKRKNS

SEQ ID NO: 2291 - protein, 5 aa, synthetic construct
SGHDT

SEQ ID NO: 2292 - protein, 6 aa, synthetic construct
YYEEEE

SEQ ID NO: 2293 - protein, 13 aa, synthetic construct
ASSRRGGAYNEQF

SEQ ID NO: 2294 - protein, 112 aa, synthetic construct
GVTQSPTHLIKTRGQQVTLRCSPKSGHDTVSWYQQALGQGPQFIFQYYEEEERQRGNFPDRFSGHQFPNYSSELNVNALLLGDSALYLCASSRRGGAYNEQFFGPGTRLTVL

SEQ ID NO: 2295 - protein, 114 aa, synthetic construct
DAGVTQSPTHLIKTRGQQVTLRCSPKSGHDTVSWYQQALGQGPQFIFQYYEEEERQRGNFPDRFSGHQFPNYSSELNVNALLLGDSALYLCASSRRGGAYNEQFFGPGTRLTVL

SEQ ID NO: 2296 - protein, 133 aa, synthetic construct
  VARIANT 2: note = X can be any Amino Acid
MXPGLLCWALLCLLGAGLVDAGVTQSPTHLIKTRGQQVTLRCSPKSGHDTVSWYQQALGQGPQFIFQYYEEEERQRGNFPDRFSGHQFPNYSSELNVNALLLGDSALYLCASSRRGGAYNEQFFGPGTRLTVL

SEQ ID NO: 2297 - protein, 133 aa, synthetic construct; identical to SEQ ID NO: 2296
  VARIANT 2: note = X can be any Amino Acid

SEQ ID NO: 2298 - protein, 306 aa, synthetic construct
MGPGLLCWALLCLLGAGLVDAGVTQSPTHLIKTRGQQVTLRCSPKSGHDTVSWYQQALGQGPQFIFQYYEEEERQRGNFPDRFSGHQFPNYSSELNVNALLLGDSALYLCASSRRGGAYNEQFFGPGTRLTVLEDLRNVTPPKVSLFEPSKAEIANKQKATLVCLARGFFPDHVELSWWVNGKEVHSGVCTDPQAYKESNYSYCLSSRLRVSATFWHNPRNHFRCQVQFHGLSEEDKWPEGSPKPVTQNISAEAWGRADCGITSASYQQGVLSATILYEILLGKATLYAVLVSTLVVMAMVKRKNS

SEQ ID NO: 2299 - protein, 306 aa, synthetic construct
MAPGLLCWALLCLLGAGLVDAGVTQSPTHLIKTRGQQVTLRCSPKSGHDTVSWYQQALGQGPQFIFQYYEEEERQRGNFPDRFSGHQFPNYSSELNVNALLLGDSALYLCASSRRGGAYNEQFFGPGTRLTVLEDLRNVTPPKVSLFEPSKAEIANKQKATLVCLARGFFPDHVELSWWVNGKEVHSGVCTDPQAYKESNYSYCLSSRLRVSATFWHNPRNHFRCQVQFHGLSEEDKWPEGSPKPVTQNISAEAWGRADCGITSASYQQGVLSATILYEILLGKATLYAVLVSTLVVMAMVKRKNS

SEQ ID NO: 2300 - protein, 306 aa, synthetic construct
MHPGLLCWALLCLLGAGLVDAGVTQSPTHLIKTRGQQVTLRCSPKSGHDTVSWYQQALGQGPQFIFQYYEEEERQRGNFPDRFSGHQFPNYSSELNVNALLLGDSALYLCASSRRGGAYNEQFFGPGTRLTVLEDLRNVTPPKVSLFEPSKAEIANKQKATLVCLARGFFPDHVELSWWVNGKEVHSGVCTDPQAYKESNYSYCLSSRLRVSATFWHNPRNHFRCQVQFHGLSEEDKWPEGSPKPVTQNISAEAWGRADCGITSASYQQGVLSATILYEILLGKATLYAVLVSTLVVMAMVKRKNS

SEQ ID NO: 2301 - protein, 5 aa, synthetic construct
SGHTA

SEQ ID NO: 2302 - protein, 6 aa, synthetic construct
FQGNSA

SEQ ID NO: 2303 - protein, 13 aa, synthetic construct
ASTWDRGSYNEQF

SEQ ID NO: 2304 - protein, 113 aa, synthetic construct
GVSQSPSNKVTEKGKDVELRCDPISGHTALYWYRQSLGQGLEFLIYFQGNSAPDKSGLPSDRFSAERTGGSVSTLTIQRTQQEDSAVYLCASTWDRGSYNEQFFGPGTRLTVL

SEQ ID NO: 2305 - protein, 115 aa, synthetic construct
GAGVSQSPSNKVTEKGKDVELRCDPISGHTALYWYRQSLGQGLEFLIYFQGNSAPDKSGLPSDRFSAERTGGSVSTLTIQRTQQEDSAVYLCASTWDRGSYNEQFFGPGTRLTVL

SEQ ID NO: 2306 - protein, 134 aa, synthetic construct
  VARIANT 2: note = X can be any Amino Acid
MXTRLLFWVAFCLLGADHTGAGVSQSPSNKVTEKGKDVELRCDPISGHTALYWYRQSLGQGLEFLIYFQGNSAPDKSGLPSDRFSAERTGGSVSTLTIQRTQQEDSAVYLCASTWDRGSYNEQFFGPGTRLTVL

SEQ ID NO: 2307 - protein, 134 aa, synthetic construct; identical to SEQ ID NO: 2306
  VARIANT 2: note = X can be any Amino Acid

SEQ ID NO: 2308 - protein, 307 aa, synthetic construct
MGTRLLFWVAFCLLGADHTGAGVSQSPSNKVTEKGKDVELRCDPISGHTALYWYRQSLGQGLEFLIYFQGNSAPDKSGLPSDRFSAERTGGSVSTLTIQRTQQEDSAVYLCASTWDRGSYNEQFFGPGTRLTVLEDLRNVTPPKVSLFEPSKAEIANKQKATLVCLARGFFPDHVELSWWVNGKEVHSGVCTDPQAYKESNYSYCLSSRLRVSATFWHNPRNHFRCQVQFHGLSEEDKWPEGSPKPVTQNISAEAWGRADCGITSASYQQGVLSATILYEILLGKATLYAVLVSTLVVMAMVKRKNS

SEQ ID NO: 2309 - protein, 307 aa, synthetic construct
MATRLLFWVAFCLLGADHTGAGVSQSPSNKVTEKGKDVELRCDPISGHTALYWYRQSLGQGLEFLIYFQGNSAPDKSGLPSDRFSAERTGGSVSTLTIQRTQQEDSAVYLCASTWDRGSYNEQFFGPGTRLTVLEDLRNVTPPKVSLFEPSKAEIANKQKATLVCLARGFFPDHVELSWWVNGKEVHSGVCTDPQAYKESNYSYCLSSRLRVSATFWHNPRNHFRCQVQFHGLSEEDKWPEGSPKPVTQNISAEAWGRADCGITSASYQQGVLSATILYEILLGKATLYAVLVSTLVVMAMVKRKNS

SEQ ID NO: 2310 - protein, 307 aa, synthetic construct
MHTRLLFWVAFCLLGADHTGAGVSQSPSNKVTEKGKDVELRCDPISGHTALYWYRQSLGQGLEFLIYFQGNSAPDKSGLPSDRFSAERTGGSVSTLTIQRTQQEDSAVYLCASTWDRGSYNEQFFGPGTRLTVLEDLRNVTPPKVSLFEPSKAEIANKQKATLVCLARGFFPDHVELSWWVNGKEVHSGVCTDPQAYKESNYSYCLSSRLRVSATFWHNPRNHFRCQVQFHGLSEEDKWPEGSPKPVTQNISAEAWGRADCGITSASYQQGVLSATILYEILLGKATLYAVLVSTLVVMAMVKRKNS

SEQ ID NO: 2311 - protein, 5 aa, synthetic construct
SGHAT

SEQ ID NO: 2312 - protein, 6 aa, synthetic construct
FQNNGV

SEQ ID NO: 2313 - protein, 14 aa, synthetic construct
ASSHLAGEFYNEQF

SEQ ID NO: 2314 - protein, 114 aa, synthetic construct
GVAQSPRYKIIEKRQSVAFWCNPISGHATLYWYQQILGQGPKLLIQFQNNGVVDDSQLPKDRFSAERLKGVDSTLKIQPAKLEDSAVYLCASSHLAGEFYNEQFFGPGTRLTVL

SEQ ID NO: 2315 - protein, 116 aa, synthetic construct
EAGVAQSPRYKIIEKRQSVAFWCNPISGHATLYWYQQILGQGPKLLIQFQNNGVVDDSQLPKDRFSAERLKGVDSTLKIQPAKLEDSAVYLCASSHLAGEFYNEQFFGPGTRLTVL

SEQ ID NO: 2316 - protein, 135 aa, synthetic construct
  VARIANT 2: note = X can be any Amino Acid
MXTRLLCWAALCLLGAELTEAGVAQSPRYKIIEKRQSVAFWCNPISGHATLYWYQQILGQGPKLLIQFQNNGVVDDSQLPKDRFSAERLKGVDSTLKIQPAKLEDSAVYLCASSHLAGEFYNEQFFGPGTRLTVL

SEQ ID NO: 2317 - protein, 135 aa, synthetic construct; identical to SEQ ID NO: 2316
  VARIANT 2: note = X can be any Amino Acid

SEQ ID NO: 2318 - protein, 308 aa, synthetic construct
MGTRLLCWAALCLLGAELTEAGVAQSPRYKIIEKRQSVAFWCNPISGHATLYWYQQILGQGPKLLIQFQNNGVVDDSQLPKDRFSAERLKGVDSTLKIQPAKLEDSAVYLCASSHLAGEFYNEQFFGPGTRLTVLEDLRNVTPPKVSLFEPSKAEIANKQKATLVCLARGFFPDHVELSWWVNGKEVHSGVCTDPQAYKESNYSYCLSSRLRVSATFWHNPRNHFRCQVQFHGLSEEDKWPEGSPKPVTQNISAEAWGRADCGITSASYQQGVLSATILYEILLGKATLYAVLVSTLVVMAMVKRKNS

SEQ ID NO: 2319 - protein, 308 aa, synthetic construct
MATRLLCWAALCLLGAELTEAGVAQSPRYKIIEKRQSVAFWCNPISGHATLYWYQQILGQGPKLLIQFQNNGVVDDSQLPKDRFSAERLKGVDSTLKIQPAKLEDSAVYLCASSHLAGEFYNEQFFGPGTRLTVLEDLRNVTPPKVSLFEPSKAEIANKQKATLVCLARGFFPDHVELSWWVNGKEVHSGVCTDPQAYKESNYSYCLSSRLRVSATFWHNPRNHFRCQVQFHGLSEEDKWPEGSPKPVTQNISAEAWGRADCGITSASYQQGVLSATILYEILLGKATLYAVLVSTLVVMAMVKRKNS

SEQ ID NO: 2320 - protein, 308 aa, synthetic construct
MHTRLLCWAALCLLGAELTEAGVAQSPRYKIIEKRQSVAFWCNPISGHATLYWYQQILGQGPKLLIQFQNNGVVDDSQLPKDRFSAERLKGVDSTLKIQPAKLEDSAVYLCASSHLAGEFYNEQFFGPGTRLTVLEDLRNVTPPKVSLFEPSKAEIANKQKATLVCLARGFFPDHVELSWWVNGKEVHSGVCTDPQAYKESNYSYCLSSRLRVSATFWHNPRNHFRCQVQFHGLSEEDKWPEGSPKPVTQNISAEAWGRADCGITSASYQQGVLSATILYEILLGKATLYAVLVSTLVVMAMVKRKNS

SEQ ID NO: 2321 - protein, 5 aa, synthetic construct
SGDLS

SEQ ID NO: 2322 - protein, 6 aa, synthetic construct
YYNGEE

SEQ ID NO: 2323 - protein, 13 aa, synthetic construct
ASSPLGDSGNTIY

SEQ ID NO: 2324 - protein, 112 aa, synthetic construct
GVTQTPKHLITATGQRVTLRCSPRSGDLSVYWYQQSLDQGLQFLIQYYNGEERAKGNILERFSAQQFPDLHSELNLSSLELGDSALYFCASSPLGDSGNTIYFGEGSWLTVV

SEQ ID NO: 2325 - protein, 114 aa, synthetic construct
DSGVTQTPKHLITATGQRVTLRCSPRSGDLSVYWYQQSLDQGLQFLIQYYNGEERAKGNILERFSAQQFPDLHSELNLSSLELGDSALYFCASSPLGDSGNTIYFGEGSWLTVV

SEQ ID NO: 2326 - protein, 133 aa, synthetic construct
  VARIANT 2: note = X can be any Amino Acid
MXFRLLCCVAFCLLGAGPVDSGVTQTPKHLITATGQRVTLRCSPRSGDLSVYWYQQSLDQGLQFLIQYYNGEERAKGNILERFSAQQFPDLHSELNLSSLELGDSALYFCASSPLGDSGNTIYFGEGSWLTVV

SEQ ID NO: 2327 - protein, 133 aa, synthetic construct; identical to SEQ ID NO: 2326
  VARIANT 2: note = X can be any Amino Acid

SEQ ID NO: 2328 - protein, 306 aa, synthetic construct
MGFRLLCCVAFCLLGAGPVDSGVTQTPKHLITATGQRVTLRCSPRSGDLSVYWYQQSLDQGLQFLIQYYNGEERAKGNILERFSAQQFPDLHSELNLSSLELGDSALYFCASSPLGDSGNTIYFGEGSWLTVVEDLRNVTPPKVSLFEPSKAEIANKQKATLVCLARGFFPDHVELSWWVNGKEVHSGVCTDPQAYKESNYSYCLSSRLRVSATFWHNPRNHFRCQVQFHGLSEEDKWPEGSPKPVTQNISAEAWGRADCGITSASYQQGVLSATILYEILLGKATLYAVLVSTLVVMAMVKRKNS

SEQ ID NO: 2329 - protein, 306 aa, synthetic construct
MAFRLLCCVAFCLLGAGPVDSGVTQTPKHLITATGQRVTLRCSPRSGDLSVYWYQQSLDQGLQFLIQYYNGEERAKGNILERFSAQQFPDLHSELNLSSLELGDSALYFCASSPLGDSGNTIYFGEGSWLTVVEDLRNVTPPKVSLFEPSKAEIANKQKATLVCLARGFFPDHVELSWWVNGKEVHSGVCTDPQAYKESNYSYCLSSRLRVSATFWHNPRNHFRCQVQFHGLSEEDKWPEGSPKPVTQNISAEAWGRADCGITSASYQQGVLSATILYEILLGKATLYAVLVSTLVVMAMVKRKNS

SEQ ID NO: 2330 - protein, 306 aa, synthetic construct
MHFRLLCCVAFCLLGAGPVDSGVTQTPKHLITATGQRVTLRCSPRSGDLSVYWYQQSLDQGLQFLIQYYNGEERAKGNILERFSAQQFPDLHSELNLSSLELGDSALYFCASSPLGDSGNTIYFGEGSWLTVVEDLRNVTPPKVSLFEPSKAEIANKQKATLVCLARGFFPDHVELSWWVNGKEVHSGVCTDPQAYKESNYSYCLSSRLRVSATFWHNPRNHFRCQVQFHGLSEEDKWPEGSPKPVTQNISAEAWGRADCGITSASYQQGVLSATILYEILLGKATLYAVLVSTLVVMAMVKRKNS

SEQ ID NO: 2331 - protein, 5 aa, synthetic construct
MNHNS

SEQ ID NO: 2332 - protein, 5 aa, synthetic construct
SASEG

SEQ ID NO: 2333 - protein, 12 aa, synthetic construct
ASSESQGNTEAF

SEQ ID NO: 2334 - protein, 111 aa, synthetic construct
GVTQTPKFQVLKTGQSMTLQCAQDMNHNSMYWYRQDPGMGLRLIYYSASEGTTDKGEVPNGYNVSRLNKREFSLRLESAAPSQTSVYFCASSESQGNTEAFFGQGTRLTVV

SEQ ID NO: 2335 - protein, 113 aa, synthetic construct
NAGVTQTPKFQVLKTGQSMTLQCAQDMNHNSMYWYRQDPGMGLRLIYYSASEGTTDKGEVPNGYNVSRLNKREFSLRLESAAPSQTSVYFCASSESQGNTEAFFGQGTRLTVV

SEQ ID NO: 2336 - protein, 132 aa, synthetic construct
  VARIANT 2: note = X can be any Amino Acid
MXIGLLCCVAFSLLWASPVNAGVTQTPKFQVLKTGQSMTLQCAQDMNHNSMYWYRQDPGMGLRLIYYSASEGTTDKGEVPNGYNVSRLNKREFSLRLESAAPSQTSVYFCASSESQGNTEAFFGQGTRLTVV

SEQ ID NO: 2337 - protein, 132 aa, synthetic construct; identical to SEQ ID NO: 2336
  VARIANT 2: note = X can be any Amino Acid

SEQ ID NO: 2338 - protein, 305 aa, synthetic construct
MSIGLLCCVAFSLLWASPVNAGVTQTPKFQVLKTGQSMTLQCAQDMNHNSMYWYRQDPGMGLRLIYYSASEGTTDKGEVPNGYNVSRLNKREFSLRLESAAPSQTSVYFCASSESQGNTEAFFGQGTRLTVVEDLRNVTPPKVSLFEPSKAEIANKQKATLVCLARGFFPDHVELSWWVNGKEVHSGVCTDPQAYKESNYSYCLSSRLRVSATFWHNPRNHFRCQVQFHGLSEEDKWPEGSPKPVTQNISAEAWGRADCGITSASYQQGVLSATILYEILLGKATLYAVLVSTLVVMAMVKRKNS

SEQ ID NO: 2339 - protein, 305 aa, synthetic construct
MAIGLLCCVAFSLLWASPVNAGVTQTPKFQVLKTGQSMTLQCAQDMNHNSMYWYRQDPGMGLRLIYYSASEGTTDKGEVPNGYNVSRLNKREFSLRLESAAPSQTSVYFCASSESQGNTEAFFGQGTRLTVVEDLRNVTPPKVSLFEPSKAEIANKQKATLVCLARGFFPDHVELSWWVNGKEVHSGVCTDPQAYKESNYSYCLSSRLRVSATFWHNPRNHFRCQVQFHGLSEEDKWPEGSPKPVTQNISAEAWGRADCGITSASYQQGVLSATILYEILLGKATLYAVLVSTLVVMAMVKRKNS

SEQ ID NO: 2340 - protein, 305 aa, synthetic construct
MHIGLLCCVAFSLLWASPVNAGVTQTPKFQVLKTGQSMTLQCAQDMNHNSMYWYRQDPGMGLRLIYYSASEGTTDKGEVPNGYNVSRLNKREFSLRLESAAPSQTSVYFCASSESQGNTEAFFGQGTRLTVVEDLRNVTPPKVSLFEPSKAEIANKQKATLVCLARGFFPDHVELSWWVNGKEVHSGVCTDPQAYKESNYSYCLSSRLRVSATFWHNPRNHFRCQVQFHGLSEEDKWPEGSPKPVTQNISAEAWGRADCGITSASYQQGVLSATILYEILLGKATLYAVLVSTLVVMAMVKRKNS

SEQ ID NO: 2341 - protein, 5 aa, synthetic construct
SGHTA

SEQ ID NO: 2342 - protein, 6 aa, synthetic construct
FQGNSA

SEQ ID NO: 2343 - protein, 13 aa, synthetic construct
ASSPIQGENSPLH

SEQ ID NO: 2344 - protein, 113 aa, synthetic construct
GVSQSPSNKVTEKGKDVELRCDPISGHTALYWYRQRLGQGLEFLIYFQGNSAPDKSGLPSDRFSAERTGESVSTLTIQRTQQEDSAVYLCASSPIQGENSPLHFGNGTRLTVT

SEQ ID NO: 2345 - protein, 115 aa, synthetic construct
GAGVSQSPSNKVTEKGKDVELRCDPISGHTALYWYRQRLGQGLEFLIYFQGNSAPDKSGLPSDRFSAERTGESVSTLTIQRTQQEDSAVYLCASSPIQGENSPLHFGNGTRLTVT

SEQ ID NO: 2346 - protein, 134 aa, synthetic construct
  VARIANT 2: note = X can be any Amino Acid
MXTRLLFWVAFCLLGAYHTGAGVSQSPSNKVTEKGKDVELRCDPISGHTALYWYRQRLGQGLEFLIYFQGNSAPDKSGLPSDRFSAERTGESVSTLTIQRTQQEDSAVYLCASSPIQGENSPLHFGNGTRLTVT

SEQ ID NO: 2347 - protein, 134 aa, synthetic construct; identical to SEQ ID NO: 2346
  VARIANT 2: note = X can be any Amino Acid

SEQ ID NO: 2348 - protein, 307 aa, synthetic construct
MGTRLLFWVAFCLLGAYHTGAGVSQSPSNKVTEKGKDVELRCDPISGHTALYWYRQRLGQGLEFLIYFQGNSAPDKSGLPSDRFSAERTGESVSTLTIQRTQQEDSAVYLCASSPIQGENSPLHFGNGTRLTVTEDLRNVTPPKVSLFEPSKAEIANKQKATLVCLARGFFPDHVELSWWVNGKEVHSGVCTDPQAYKESNYSYCLSSRLRVSATFWHNPRNHFRCQVQFHGLSEEDKWPEGSPKPVTQNISAEAWGRADCGITSASYQQGVLSATILYEILLGKATLYAVLVSTLVVMAMVKRKNS

SEQ ID NO: 2349 - protein, 307 aa, synthetic construct
MATRLLFWVAFCLLGAYHTGAGVSQSPSNKVTEKGKDVELRCDPISGHTALYWYRQRLGQGLEFLIYFQGNSAPDKSGLPSDRFSAERTGESVSTLTIQRTQQEDSAVYLCASSPIQGENSPLHFGNGTRLTVTEDLRNVTPPKVSLFEPSKAEIANKQKATLVCLARGFFPDHVELSWWVNGKEVHSGVCTDPQAYKESNYSYCLSSRLRVSATFWHNPRNHFRCQVQFHGLSEEDKWPEGSPKPVTQNISAEAWGRADCGITSASYQQGVLSATILYEILLGKATLYAVLVSTLVVMAMVKRKNS

SEQ ID NO: 2350 - protein, 307 aa, synthetic construct
MHTRLLFWVAFCLLGAYHTGAGVSQSPSNKVTEKGKDVELRCDPISGHTALYWYRQRLGQGLEFLIYFQGNSAPDKSGLPSDRFSAERTGESVSTLTIQRTQQEDSAVYLCASSPIQGENSPLHFGNGTRLTVTEDLRNVTPPKVSLFEPSKAEIANKQKATLVCLARGFFPDHVELSWWVNGKEVHSGVCTDPQAYKESNYSYCLSSRLRVSATFWHNPRNHFRCQVQFHGLSEEDKWPEGSPKPVTQNISAEAWGRADCGITSASYQQGVLSATILYEILLGKATLYAVLVSTLVVMAMVKRKNS

SEQ ID NO: 2351 - protein, 5 aa, synthetic construct
SGHTA

SEQ ID NO: 2352 - protein, 6 aa, synthetic construct
FQGNSA

SEQ ID NO: 2353 - protein, 13 aa, synthetic construct
ASSPIQGENSPLH

SEQ ID NO: 2354 - protein, 113 aa, synthetic construct; identical to SEQ ID NO: 2344

SEQ ID NO: 2355 - protein, 115 aa, synthetic construct; identical to SEQ ID NO: 2345

SEQ ID NO: 2356 - protein, 134 aa, synthetic construct; identical to SEQ ID NO: 2346
  VARIANT 2: note = X can be any Amino Acid

SEQ ID NO: 2357 - protein, 134 aa, synthetic construct; identical to SEQ ID NO: 2346
  VARIANT 2: note = X can be any Amino Acid

SEQ ID NO: 2358 - protein, 307 aa, synthetic construct; identical to SEQ ID NO: 2348

SEQ ID NO: 2359 - protein, 307 aa, synthetic construct; identical to SEQ ID NO: 2349

SEQ ID NO: 2360 - protein, 307 aa, synthetic construct; identical to SEQ ID NO: 2350

SEQ ID NO: 2361 - protein, 5 aa, synthetic construct
LNHDA

SEQ ID NO: 2362 - protein, 6 aa, synthetic construct
SQIVND

SEQ ID NO: 2363 - protein, 5 aa, synthetic construct
ASEAF

SEQ ID NO: 2364 - protein, 104 aa, synthetic construct
GITQSPKYLFRKEGQNVTLSCEQNLNHDAMYWYRQDPGQGLRLIYYSQIVNDFQKGDIAEGYSVSREKKESFPLIVTSAQKNPTASYLCASEAFFGQGTRLTVV

SEQ ID NO: 2365 - protein, 106 aa, synthetic construct
DGGITQSPKYLFRKEGQNVTLSCEQNLNHDAMYWYRQDPGQGLRLIYYSQIVNDFQKGDIAEGYSVSREKKESFPLIVTSAQKNPTASYLCASEAFFGQGTRLTVV

SEQ ID NO: 2366 - protein, 125 aa, synthetic construct
  VARIANT 2: note = X can be any Amino Acid
MXNQVLCCVVLCFLGANTVDGGITQSPKYLFRKEGQNVTLSCEQNLNHDAMYWYRQDPGQGLRLIYYSQIVNDFQKGDIAEGYSVSREKKESFPLIVTSAQKNPTASYLCASEAFFGQGTRLTVV

SEQ ID NO: 2367 - protein, 125 aa, synthetic construct; identical to SEQ ID NO: 2366
  VARIANT 2: note = X can be any Amino Acid

SEQ ID NO: 2368 - protein, 298 aa, synthetic construct
MSNQVLCCVVLCFLGANTVDGGITQSPKYLFRKEGQNVTLSCEQNLNHDAMYWYRQDPGQGLRLIYYSQIVNDFQKGDIAEGYSVSREKKESFPLIVTSAQKNPTASYLCASEAFFGQGTRLTVVEDLRNVTPPKVSLFEPSKAEIANKQKATLVCLARGFFPDHVELSWWVNGKEVHSGVCTDPQAYKESNYSYCLSSRLRVSATFWHNPRNHFRCQVQFHGLSEEDKWPEGSPKPVTQNISAEAWGRADCGITSASYQQGVLSATILYEILLGKATLYAVLVSTLVVMAMVKRKNS

SEQ ID NO: 2369 - protein, 298 aa, synthetic construct
MANQVLCCVVLCFLGANTVDGGITQSPKYLFRKEGQNVTLSCEQNLNHDAMYWYRQDPGQGLRLIYYSQIVNDFQKGDIAEGYSVSREKKESFPLIVTSAQKNPTASYLCASEAFFGQGTRLTVVEDLRNVTPPKVSLFEPSKAEIANKQKATLVCLARGFFPDHVELSWWVNGKEVHSGVCTDPQAYKESNYSYCLSSRLRVSATFWHNPRNHFRCQVQFHGLSEEDKWPEGSPKPVTQNISAEAWGRADCGITSASYQQGVLSATILYEILLGKATLYAVLVSTLVVMAMVKRKNS

SEQ ID NO: 2370 - protein, 298 aa, synthetic construct
MHNQVLCCVVLCFLGANTVDGGITQSPKYLFRKEGQNVTLSCEQNLNHDAMYWYRQDPGQGLRLIYYSQIVNDFQKGDIAEGYSVSREKKESFPLIVTSAQKNPTASYLCASEAFFGQGTRLTVVEDLRNVTPPKVSLFEPSKAEIANKQKATLVCLARGFFPDHVELSWWVNGKEVHSGVCTDPQAYKESNYSYCLSSRLRVSATFWHNPRNHFRCQVQFHGLSEEDKWPEGSPKPVTQNISAEAWGRADCGITSASYQQGVLSATILYEILLGKATLYAVLVSTLVVMAMVKRKNS

SEQ ID NO: 2371 - protein, 4 aa, synthetic construct
LGHD

SEQ ID NO: 2372 - protein, 6 aa, synthetic construct
YNNKEL

SEQ ID NO: 2373 - protein, 12 aa, synthetic construct
ASRTIGYNTEAF

SEQ ID NO: 2374 - protein, 108 aa, synthetic construct
QTPKYLVTQMGNDKSIKCEQNLGHDTMYWYKQDSKKFLKIMFSYNNKELIINETVPNRFSPKSPDKAHLNLHINSLELGDSAVYFCASRTIGYNTEAFFGQGTRLTVV

SEQ ID NO: 2375 - protein, 113 aa, synthetic construct
DTAVSQTPKYLVTQMGNDKSIKCEQNLGHDTMYWYKQDSKKFLKIMFSYNNKELIINETVPNRFSPKSPDKAHLNLHINSLELGDSAVYFCASRTIGYNTEAFFGQGTRLTVV

SEQ ID NO: 2376 - protein, 132 aa, synthetic construct
  VARIANT 2: note = X can be any Amino Acid
MXCRLLCCVVFCLLQAGPLDTAVSQTPKYLVTQMGNDKSIKCEQNLGHDTMYWYKQDSKKFLKIMFSYNNKELIINETVPNRFSPKSPDKAHLNLHINSLELGDSAVYFCASRTIGYNTEAFFGQGTRLTVV

SEQ ID NO: 2377 - protein, 132 aa, synthetic construct; identical to SEQ ID NO: 2376
  VARIANT 2: note = X can be any Amino Acid

SEQ ID NO: 2378 - protein, 305 aa, synthetic construct
MGCRLLCCVVFCLLQAGPLDTAVSQTPKYLVTQMGNDKSIKCEQNLGHDTMYWYKQDSKKFLKIMFSYNNKELIINETVPNRFSPKSPDKAHLNLHINSLELGDSAVYFCASRTIGYNTEAFFGQGTRLTVVEDLRNVTPPKVSLFEPSKAEIANKQKATLVCLARGFFPDHVELSWWVNGKEVHSGVCTDPQAYKESNYSYCLSSRLRVSATFWHNPRNHFRCQVQFHGLSEEDKWPEGSPKPVTQNISAEAWGRADCGITSASYQQGVLSATILYEILLGKATLYAVLVSTLVVMAMVKRKNS

SEQ ID NO: 2379 - protein, 305 aa, synthetic construct
MACRLLCCVVFCLLQAGPLDTAVSQTPKYLVTQMGNDKSIKCEQNLGHDTMYWYKQDSKKFLKIMFSYNNKELIINETVPNRFSPKSPDKAHLNLHINSLELGDSAVYFCASRTIGYNTEAFFGQGTRLTVVEDLRNVTPPKVSLFEPSKAEIANKQKATLVCLARGFFPDHVELSWWVNGKEVHSGVCTDPQAYKESNYSYCLSSRLRVSATFWHNPRNHFRCQVQFHGLSEEDKWPEGSPKPVTQNISAEAWGRADCGITSASYQQGVLSATILYEILLGKATLYAVLVSTLVVMAMVKRKNS

SEQ ID NO: 2380 - protein, 305 aa, synthetic construct
MHCRLLCCVVFCLLQAGPLDTAVSQTPKYLVTQMGNDKSIKCEQNLGHDTMYWYKQDSKKFLKIMFSYNNKELIINETVPNRFSPKSPDKAHLNLHINSLELGDSAVYFCASRTIGYNTEAFFGQGTRLTVVEDLRNVTPPKVSLFEPSKAEIANKQKATLVCLARGFFPDHVELSWWVNGKEVHSGVCTDPQAYKESNYSYCLSSRLRVSATFWHNPRNHFRCQVQFHGLSEEDKWPEGSPKPVTQNISAEAWGRADCGITSASYQQGVLSATILYEILLGKATLYAVLVSTLVVMAMVKRKNS

SEQ ID NO: 2381 - protein, 5 aa, synthetic construct
SGHTA

SEQ ID NO: 2382 - protein, 6 aa, synthetic construct
FQGTGA

SEQ ID NO: 2383 - protein, 13 aa, synthetic construct
ASSLSGLLQETQY

SEQ ID NO: 2384 - protein, 113 aa, synthetic construct
GVSQTPSNKVTEKGKYVELRCDPISGHTALYWYRQSLGQGPEFLIYFQGTGAADDSGLPNDRFFAVRPEGSVSTLKIQRTERGDSAVYLCASSLSGLLQETQYFGPGTRLLVL

SEQ ID NO: 2385 - protein, 115 aa, synthetic construct
GAGVSQTPSNKVTEKGKYVELRCDPISGHTALYWYRQSLGQGPEFLIYFQGTGAADDSGLPNDRFFAVRPEGSVSTLKIQRTERGDSAVYLCASSLSGLLQETQYFGPGTRLLVL

SEQ ID NO: 2386 - protein, 134 aa, synthetic construct
  VARIANT 2: note = X can be any Amino Acid
MXTRLLCWAALCLLGADHTGAGVSQTPSNKVTEKGKYVELRCDPISGHTALYWYRQSLGQGPEFLIYFQGTGAADDSGLPNDRFFAVRPEGSVSTLKIQRTERGDSAVYLCASSLSGLLQETQYFGPGTRLLVL

SEQ ID NO: 2387 - protein, 134 aa, synthetic construct; identical to SEQ ID NO: 2386
  VARIANT 2: note = X can be any Amino Acid

SEQ ID NO: 2388 - protein, 307 aa, synthetic construct
MGTRLLCWAALCLLGADHTGAGVSQTPSNKVTEKGKYVELRCDPISGHTALYWYRQSLGQGPEFLIYFQGTGAADDSGLPNDRFFAVRPEGSVSTLKIQRTERGDSAVYLCASSLSGLLQETQYFGPGTRLLVLEDLRNVTPPKVSLFEPSKAEIANKQKATLVCLARGFFPDHVELSWWVNGKEVHSGVCTDPQAYKESNYSYCLSSRLRVSATFWHNPRNHFRCQVQFHGLSEEDKWPEGSPKPVTQNISAEAWGRADCGITSASYQQGVLSATILYEILLGKATLYAVLVSTLVVMAMVKRKNS

SEQ ID NO: 2389 - protein, 307 aa, synthetic construct
MATRLLCWAALCLLGADHTGAGVSQTPSNKVTEKGKYVELRCDPISGHTALYWYRQSLGQGPEFLIYFQGTGAADDSGLPNDRFFAVRPEGSVSTLKIQRTERGDSAVYLCASSLSGLLQETQYFGPGTRLLVLEDLRNVTPPKVSLFEPSKAEIANKQKATLVCLARGFFPDHVELSWWVNGKEVHSGVCTDPQAYKESNYSYCLSSRLRVSATFWHNPRNHFRCQVQFHGLSEEDKWPEGSPKPVTQNISAEAWGRADCGITSASYQQGVLSATILYEILLGKATLYAVLVSTLVVMAMVKRKNS

SEQ ID NO: 2390 - protein, 307 aa, synthetic construct
MHTRLLCWAALCLLGADHTGAGVSQTPSNKVTEKGKYVELRCDPISGHTALYWYRQSLGQGPEFLIYFQGTGAADDSGLPNDRFFAVRPEGSVSTLKIQRTERGDSAVYLCASSLSGLLQETQYFGPGTRLLVLEDLRNVTPPKVSLFEPSKAEIANKQKATLVCLARGFFPDHVELSWWVNGKEVHSGVCTDPQAYKESNYSYCLSSRLRVSATFWHNPRNHFRCQVQFHGLSEEDKWPEGSPKPVTQNISAEAWGRADCGITSASYQQGVLSATILYEILLGKATLYAVLVSTLVVMAMVKRKNS

SEQ ID NO: 2391 - protein, 5 aa, synthetic construct
SGHAT

SEQ ID NO: 2392 - protein, 6 aa, synthetic construct
FQNNGV

SEQ ID NO: 2393 - protein, 13 aa, synthetic construct
ASSTGGGRHQPQH

SEQ ID NO: 2394 - protein, 113 aa, synthetic construct
GVAQSPRYKIIEKRQSVAFWCNPISGHATLYWYQQILGQGPKLLIQFQNNGVVDDSQLPKDRFSAERLKGVDSTLKIQPAKLEDSAVYLCASSTGGGRHQPQHFGDGTRLSIL

SEQ ID NO: 2395 - protein, 115 aa, synthetic construct
EAGVAQSPRYKIIEKRQSVAFWCNPISGHATLYWYQQILGQGPKLLIQFQNNGVVDDSQLPKDRFSAERLKGVDSTLKIQPAKLEDSAVYLCASSTGGGRHQPQHFGDGTRLSIL

SEQ ID NO: 2396 - protein, 134 aa, synthetic construct
  VARIANT 2: note = X can be any Amino Acid
MXTRLLCWAALCLLGAELTEAGVAQSPRYKIIEKRQSVAFWCNPISGHATLYWYQQILGQGPKLLIQFQNNGVVDDSQLPKDRFSAERLKGVDSTLKIQPAKLEDSAVYLCASSTGGGRHQPQHFGDGTRLSIL

SEQ ID NO: 2397 - protein, 134 aa, synthetic construct; identical to SEQ ID NO: 2396
  VARIANT 2: note = X can be any Amino Acid

SEQ ID NO: 2398 - protein, 307 aa, synthetic construct
MGTRLLCWAALCLLGAELTEAGVAQSPRYKIIEKRQSVAFWCNPISGHATLYWYQQILGQGPKLLIQFQNNGVVDDSQLPKDRFSAERLKGVDSTLKIQPAKLEDSAVYLCASSTGGGRHQPQHFGDGTRLSILEDLRNVTPPKVSLFEPSKAEIANKQKATLVCLARGFFPDHVELSWWVNGKEVHSGVCTDPQAYKESNYSYCLSSRLRVSATFWHNPRNHFRCQVQFHGLSEEDKWPEGSPKPVTQNISAEAWGRADCGITSASYQQGVLSATILYEILLGKATLYAVLVSTLVVMAMVKRKNS

SEQ ID NO: 2399 - protein, 307 aa, synthetic construct
MATRLLCWAALCLLGAELTEAGVAQSPRYKIIEKRQSVAFWCNPISGHATLYWYQQILGQGPKLLIQFQNNGVVDDSQLPKDRFSAERLKGVDSTLKIQPAKLEDSAVYLCASSTGGGRHQPQHFGDGTRLSILEDLRNVTPPKVSLFEPSKAEIANKQKATLVCLARGFFPDHVELSWWVNGKEVHSGVCTDPQAYKESNYSYCLSSRLRVSATFWHNPRNHFRCQVQFHGLSEEDKWPEGSPKPVTQNISAEAWGRADCGITSASYQQGVLSATILYEILLGKATLYAVLVSTLVVMAMVKRKNS

SEQ ID NO: 2400 - protein, 307 aa, synthetic construct
MHTRLLCWAALCLLGAELTEAGVAQSPRYKIIEKRQSVAFWCNPISGHATLYWYQQILGQGPKLLIQFQNNGVVDDSQLPKDRFSAERLKGVDSTLKIQPAKLEDSAVYLCASSTGGGRHQPQHFGDGTRLSILEDLRNVTPPKVSLFEPSKAEIANKQKATLVCLARGFFPDHVELSWWVNGKEVHSGVCTDPQAYKESNYSYCLSSRLRVSATFWHNPRNHFRCQVQFHGLSEEDKWPEGSPKPVTQNISAEAWGRADCGITSASYQQGVLSATILYEILLGKATLYAVLVSTLVVMAMVKRKNS

SEQ ID NO: 2401 - protein, 5 aa, synthetic construct
SGHAT

SEQ ID NO: 2402 - protein, 6 aa, synthetic construct
FQNNGV

SEQ ID NO: 2403 - protein, 13 aa, synthetic construct
ASSTGGGRHQPQH

SEQ ID NO: 2404 - protein, 113 aa, synthetic construct; identical to SEQ ID NO: 2394

SEQ ID NO: 2405 - protein, 115 aa, synthetic construct; identical to SEQ ID NO: 2395

SEQ ID NO: 2406 - protein, 134 aa, synthetic construct; identical to SEQ ID NO: 2396
  VARIANT 2: note = X can be any Amino Acid

SEQ ID NO: 2407 - protein, 134 aa, synthetic construct; identical to SEQ ID NO: 2396
  VARIANT 2: note = X can be any Amino Acid

SEQ ID NO: 2408 - protein, 307 aa, synthetic construct; identical to SEQ ID NO: 2398

SEQ ID NO: 2409 - protein, 307 aa, synthetic construct; identical to SEQ ID NO: 2399

SEQ ID NO: 2410 - protein, 307 aa, synthetic construct; identical to SEQ ID NO: 2400

SEQ ID NO: 2411 - protein, 5 aa, synthetic construct
SGHAT

SEQ ID NO: 2412 - protein, 6 aa, synthetic construct
FQNNGV

SEQ ID NO: 2413 - protein, 13 aa, synthetic construct
ASSTGGGRHQPQH

SEQ ID NO: 2414 - protein, 113 aa, synthetic construct; identical to SEQ ID NO: 2394

SEQ ID NO: 2415 - protein, 115 aa, synthetic construct; identical to SEQ ID NO: 2395

SEQ ID NO: 2416 - protein, 134 aa, synthetic construct; identical to SEQ ID NO: 2396
  VARIANT 2: note = X can be any Amino Acid

SEQ ID NO: 2417 - protein, 134 aa, synthetic construct; identical to SEQ ID NO: 2396
  VARIANT 2: note = X can be any Amino Acid

SEQ ID NO: 2418 - protein, 307 aa, synthetic construct; identical to SEQ ID NO: 2398

SEQ ID NO: 2419 - protein, 307 aa, synthetic construct; identical to SEQ ID NO: 2399

SEQ ID NO: 2420 - protein, 307 aa, synthetic construct; identical to SEQ ID NO: 2400

SEQ ID NO: 2421 - protein, 5 aa, synthetic construct
SGHAT

SEQ ID NO: 2422 - protein, 6 aa, synthetic construct
FQNNGV

SEQ ID NO: 2423 - protein, 13 aa, synthetic construct
ASSTGGGRHQPQH

SEQ ID NO: 2424 - protein, 113 aa, synthetic construct; identical to SEQ ID NO: 2394

SEQ ID NO: 2425 - protein, 115 aa, synthetic construct; identical to SEQ ID NO: 2395

SEQ ID NO: 2426 - protein, 134 aa, synthetic construct; identical to SEQ ID NO: 2396
  VARIANT 2: note = X can be any Amino Acid

SEQ ID NO: 2427 - protein, 134 aa, synthetic construct; identical to SEQ ID NO: 2396
  VARIANT 2: note = X can be any Amino Acid

SEQ ID NO: 2428 - protein, 307 aa, synthetic construct; identical to SEQ ID NO: 2398

SEQ ID NO: 2429 - protein, 307 aa, synthetic construct; identical to SEQ ID NO: 2399

SEQ ID NO: 2430 - protein, 307 aa, synthetic construct; identical to SEQ ID NO: 2400

SEQ ID NO: 2431 - protein, 5 aa, synthetic construct
WSHSY

SEQ ID NO: 2432 - protein, 6 aa, synthetic construct
SAAADI

SEQ ID NO: 2433 - protein, 11 aa, synthetic construct
ASSGSRTDTQY

SEQ ID NO: 2434 - protein, 110 aa, synthetic construct
GITQSPRYKITETGRQVTLMCHQTWSHSYMFWYRQDLGHGLRLIYYSAAADITDKGEVPDGYVVSRSKTENFPLTLESATRSQTSVYFCASSGSRTDTQYFGPGTRLTVL

SEQ ID NO: 2435 - protein, 112 aa, synthetic construct
DAGITQSPRYKITETGRQVTLMCHQTWSHSYMFWYRQDLGHGLRLIYYSAAADITDKGEVPDGYVVSRSKTENFPLTLESATRSQTSVYFCASSGSRTDTQYFGPGTRLTVL

SEQ ID NO: 2436 - protein, 131 aa, synthetic construct
  VARIANT 2: note = X can be any Amino Acid
MXTRLFFYVALCLLWAGHRDAGITQSPRYKITETGRQVTLMCHQTWSHSYMFWYRQDLGHGLRLIYYSAAADITDKGEVPDGYVVSRSKTENFPLTLESATRSQTSVYFCASSGSRTDTQYFGPGTRLTVL

SEQ ID NO: 2437 - protein, 131 aa, synthetic construct; identical to SEQ ID NO: 2436
  VARIANT 2: note = X can be any Amino Acid

SEQ ID NO: 2438 - protein, 304 aa, synthetic construct
MGTRLFFYVALCLLWAGHRDAGITQSPRYKITETGRQVTLMCHQTWSHSYMFWYRQDLGHGLRLIYYSAAADITDKGEVPDGYVVSRSKTENFPLTLESATRSQTSVYFCASSGSRTDTQYFGPGTRLTVLEDLRNVTPPKVSLFEPSKAEIANKQKATLVCLARGFFPDHVELSWWVNGKEVHSGVCTDPQAYKESNYSYCLSSRLRVSATFWHNPRNHFRCQVQFHGLSEEDKWPEGSPKPVTQNISAEAWGRADCGITSASYQQGVLSATILYEILLGKATLYAVLVSTLVVMAMVKRKNS

SEQ ID NO: 2439 - protein, 304 aa, synthetic construct
MATRLFFYVALCLLWAGHRDAGITQSPRYKITETGRQVTLMCHQTWSHSYMFWYRQDLGHGLRLIYYSAAADITDKGEVPDGYVVSRSKTENFPLTLESATRSQTSVYFCASSGSRTDTQYFGPGTRLTVLEDLRNVTPPKVSLFEPSKAEIANKQKATLVCLARGFFPDHVELSWWVNGKEVHSGVCTDPQAYKESNYSYCLSSRLRVSATFWHNPRNHFRCQVQFHGLSEEDKWPEGSPKPVTQNISAEAWGRADCGITSASYQQGVLSATILYEILLGKATLYAVLVSTLVVMAMVKRKNS

SEQ ID NO: 2440 - protein, 304 aa, synthetic construct
MHTRLFFYVALCLLWAGHRDAGITQSPRYKITETGRQVTLMCHQTWSHSYMFWYRQDLGHGLRLIYYSAAADITDKGEVPDGYVVSRSKTENFPLTLESATRSQTSVYFCASSGSRTDTQYFGPGTRLTVLEDLRNVTPPKVSLFEPSKAEIANKQKATLVCLARGFFPDHVELSWWVNGKEVHSGVCTDPQAYKESNYSYCLSSRLRVSATFWHNPRNHFRCQVQFHGLSEEDKWPEGSPKPVTQNISAEAWGRADCGITSASYQQGVLSATILYEILLGKATLYAVLVSTLVVMAMVKRKNS

SEQ ID NO: 2441 - protein, 5 aa, synthetic construct
MGHRA

SEQ ID NO: 2442 - protein, 6 aa, synthetic construct
YSYEKL

SEQ ID NO: 2443 - protein, 12 aa, synthetic construct
ASSQVGLTYEQY

SEQ ID NO: 2444 - protein, 111 aa, synthetic construct
EVTQTPKHLVMGMTNKKSLKCEQHMGHRAMYWYKQKAKKPPELMFVYSYEKLSINESVPSRFSPECPNSSLLNLHLHALQPEDSALYLCASSQVGLTYEQYFGPGTRLTVT

SEQ ID NO: 2445 - protein, 113 aa, synthetic construct
DTEVTQTPKHLVMGMTNKKSLKCEQHMGHRAMYWYKQKAKKPPELMFVYSYEKLSINESVPSRFSPECPNSSLLNLHLHALQPEDSALYLCASSQVGLTYEQYFGPGTRLTVT

SEQ ID NO: 2446 - protein, 132 aa, synthetic construct
  VARIANT 2: note = X can be any Amino Acid
MXCRLLCCAVLCLLGAVPIDTEVTQTPKHLVMGMTNKKSLKCEQHMGHRAMYWYKQKAKKPPELMFVYSYEKLSINESVPSRFSPECPNSSLLNLHLHALQPEDSALYLCASSQVGLTYEQYFGPGTRLTVT

SEQ ID NO: 2447 - protein, 132 aa, synthetic construct; identical to SEQ ID NO: 2446
  VARIANT 2: note = X can be any Amino Acid

SEQ ID NO: 2448 - protein, 305 aa, synthetic construct
MGCRLLCCAVLCLLGAVPIDTEVTQTPKHLVMGMTNKKSLKCEQHMGHRAMYWYKQKAKKPPELMFVYSYEKLSINESVPSRFSPECPNSSLLNLHLHALQPEDSALYLCASSQVGLTYEQYFGPGTRLTVTEDLRNVTPPKVSLFEPSKAEIANKQKATLVCLARGFFPDHVELSWWVNGKEVHSGVCTDPQAYKESNYSYCLSSRLRVSATFWHNPRNHFRCQVQFHGLSEEDKWPEGSPKPVTQNISAEAWGRADCGITSASYQQGVLSATILYEILLGKATLYAVLVSTLVVMAMVKRKNS

SEQ ID NO: 2449 - protein, 305 aa, synthetic construct
MACRLLCCAVLCLLGAVPIDTEVTQTPKHLVMGMTNKKSLKCEQHMGHRAMYWYKQKAKKPPELMFVYSYEKLSINESVPSRFSPECPNSSLLNLHLHALQPEDSALYLCASSQVGLTYEQYFGPGTRLTVTEDLRNVTPPKVSLFEPSKAEIANKQKATLVCLARGFFPDHVELSWWVNGKEVHSGVCTDPQAYKESNYSYCLSSRLRVSATFWHNPRNHFRCQVQFHGLSEEDKWPEGSPKPVTQNISAEAWGRADCGITSASYQQGVLSATILYEILLGKATLYAVLVSTLVVMAMVKRKNS

SEQ ID NO: 2450 - protein, 305 aa, synthetic construct
MHCRLLCCAVLCLLGAVPIDTEVTQTPKHLVMGMTNKKSLKCEQHMGHRAMYWYKQKAKKPPELMFVYSYEKLSINESVPSRFSPECPNSSLLNLHLHALQPEDSALYLCASSQVGLTYEQYFGPGTRLTVTEDLRNVTPPKVSLFEPSKAEIANKQKATLVCLARGFFPDHVELSWWVNGKEVHSGVCTDPQAYKESNYSYCLSSRLRVSATFWHNPRNHFRCQVQFHGLSEEDKWPEGSPKPVTQNISAEAWGRADCGITSASYQQGVLSATILYEILLGKATLYAVLVSTLVVMAMVKRKNS

SEQ ID NO: 2451 - protein, 5 aa, synthetic construct
SGHAT

SEQ ID NO: 2452 - protein, 6 aa, synthetic construct
FQNNGV

SEQ ID NO: 2453 - protein, 11 aa, synthetic construct
ASSLGQGQTQY

SEQ ID NO: 2454 - protein, 111 aa, synthetic construct
GVAQSPRYKIIEKRQSVAFWCNPISGHATLYWYQQILGQGPKLLIQFQNNGVVDDSQLPKDRFSAERLKGVDSTLKIQPAKLEDSAVYLCASSLGQGQTQYFGPGTRLLVL

SEQ ID NO: 2455 - protein, 113 aa, synthetic construct
EAGVAQSPRYKIIEKRQSVAFWCNPISGHATLYWYQQILGQGPKLLIQFQNNGVVDDSQLPKDRFSAERLKGVDSTLKIQPAKLEDSAVYLCASSLGQGQTQYFGPGTRLLVL

SEQ ID NO: 2456 - protein, 132 aa, synthetic construct
  VARIANT 2: note = X can be any Amino Acid
MXTRLLCWAALCLLGAELTEAGVAQSPRYKIIEKRQSVAFWCNPISGHATLYWYQQILGQGPKLLIQFQNNGVVDDSQLPKDRFSAERLKGVDSTLKIQPAKLEDSAVYLCASSLGQGQTQYFGPGTRLLVL

SEQ ID NO: 2457 - protein, 132 aa, synthetic construct; identical to SEQ ID NO: 2456
  VARIANT 2: note = X can be any Amino Acid

SEQ ID NO: 2458 - protein, 305 aa, synthetic construct
MGTRLLCWAALCLLGAELTEAGVAQSPRYKIIEKRQSVAFWCNPISGHATLYWYQQILGQGPKLLIQFQNNGVVDDSQLPKDRFSAERLKGVDSTLKIQPAKLEDSAVYLCASSLGQGQTQYFGPGTRLLVLEDLRNVTPPKVSLFEPSKAEIANKQKATLVCLARGFFPDHVELSWWVNGKEVHSGVCTDPQAYKESNYSYCLSSRLRVSATFWHNPRNHFRCQVQFHGLSEEDKWPEGSPKPVTQNISAEAWGRADCGITSASYQQGVLSATILYEILLGKATLYAVLVSTLVVMAMVKRKNS

SEQ ID NO: 2459 - protein, 305 aa, synthetic construct
MATRLLCWAALCLLGAELTEAGVAQSPRYKIIEKRQSVAFWCNPISGHATLYWYQQILGQGPKLLIQFQNNGVVDDSQLPKDRFSAERLKGVDSTLKIQPAKLEDSAVYLCASSLGQGQTQYFGPGTRLLVLEDLRNVTPPKVSLFEPSKAEIANKQKATLVCLARGFFPDHVELSWWVNGKEVHSGVCTDPQAYKESNYSYCLSSRLRVSATFWHNPRNHFRCQVQFHGLSEEDKWPEGSPKPVTQNISAEAWGRADCGITSASYQQGVLSATILYEILLGKATLYAVLVSTLVVMAMVKRKNS

SEQ ID NO: 2460 - protein, 305 aa, synthetic construct
MHTRLLCWAALCLLGAELTEAGVAQSPRYKIIEKRQSVAFWCNPISGHATLYWYQQILGQGPKLLIQFQNNGVVDDSQLPKDRFSAERLKGVDSTLKIQPAKLEDSAVYLCASSLGQGQTQYFGPGTRLLVLEDLRNVTPPKVSLFEPSKAEIANKQKATLVCLARGFFPDHVELSWWVNGKEVHSGVCTDPQAYKESNYSYCLSSRLRVSATFWHNPRNHFRCQVQFHGLSEEDKWPEGSPKPVTQNISAEAWGRADCGITSASYQQGVLSATILYEILLGKATLYAVLVSTLVVMAMVKRKNS

SEQ ID NO: 2461 - protein, 5 aa, synthetic construct
MDHEN

SEQ ID NO: 2462 - protein, 6 aa, synthetic construct
SYDVKM

SEQ ID NO: 2463 - protein, 11 aa, synthetic construct
ASKGDQNTEAF

SEQ ID NO: 2464 - protein, 105 aa, synthetic construct
SRYLVKRTGEKVFLECVQDMDHENMFWYRQDPGLGLRLIYFSYDVKMKEKGDIPEGYSVSREKKERFSLILESASTNQTSMYLCASKGDQNTEAFFGQGTRLTVV

SEQ ID NO: 2465 - protein, 112 aa, synthetic construct
DVKVTQSSRYLVKRTGEKVFLECVQDMDHENMFWYRQDPGLGLRLIYFSYDVKMKEKGDIPEGYSVSREKKERFSLILESASTNQTSMYLCASKGDQNTEAFFGQGTRLTVV

SEQ ID NO: 2466 - protein, 131 aa, synthetic construct
  VARIANT 2: note = X can be any Amino Acid
MXIRLLCRVAFCFLAVGLVDVKVTQSSRYLVKRTGEKVFLECVQDMDHENMFWYRQDPGLGLRLIYFSYDVKMKEKGDIPEGYSVSREKKERFSLILESASTNQTSMYLCASKGDQNTEAFFGQGTRLTVV

SEQ ID NO: 2467 - protein, 131 aa, synthetic construct; identical to SEQ ID NO: 2466
  VARIANT 2: note = X can be any Amino Acid

SEQ ID NO: 2468 - protein, 304 aa, synthetic construct
MGIRLLCRVAFCFLAVGLVDVKVTQSSRYLVKRTGEKVFLECVQDMDHENMFWYRQDPGLGLRLIYFSYDVKMKEKGDIPEGYSVSREKKERFSLILESASTNQTSMYLCASKGDQNTEAFFGQGTRLTVVEDLRNVTPPKVSLFEPSKAEIANKQKATLVCLARGFFPDHVELSWWVNGKEVHSGVCTDPQAYKESNYSYCLSSRLRVSATFWHNPRNHFRCQVQFHGLSEEDKWPEGSPKPVTQNISAEAWGRADCGITSASYQQGVLSATILYEILLGKATLYAVLVSTLVVMAMVKRKNS

SEQ ID NO: 2469 - protein, 304 aa, synthetic construct
MAIRLLCRVAFCFLAVGLVDVKVTQSSRYLVKRTGEKVFLECVQDMDHENMFWYRQDPGLGLRLIYFSYDVKMKEKGDIPEGYSVSREKKERFSLILESASTNQTSMYLCASKGDQNTEAFFGQGTRLTVVEDLRNVTPPKVSLFEPSKAEIANKQKATLVCLARGFFPDHVELSWWVNGKEVHSGVCTDPQAYKESNYSYCLSSRLRVSATFWHNPRNHFRCQVQFHGLSEEDKWPEGSPKPVTQNISAEAWGRADCGITSASYQQGVLSATILYEILLGKATLYAVLVSTLVVMAMVKRKNS

SEQ ID NO: 2470 - protein, 304 aa, synthetic construct
MHIRLLCRVAFCFLAVGLVDVKVTQSSRYLVKRTGEKVFLECVQDMDHENMFWYRQDPGLGLRLIYFSYDVKMKEKGDIPEGYSVSREKKERFSLILESASTNQTSMYLCASKGDQNTEAFFGQGTRLTVVEDLRNVTPPKVSLFEPSKAEIANKQKATLVCLARGFFPDHVELSWWVNGKEVHSGVCTDPQAYKESNYSYCLSSRLRVSATFWHNPRNHFRCQVQFHGLSEEDKWPEGSPKPVTQNISAEAWGRADCGITSASYQQGVLSATILYEILLGKATLYAVLVSTLVVMAMVKRKNS

SEQ ID NO: 2471 - protein, 5 aa, synthetic construct
MDHEN

SEQ ID NO: 2472 - protein, 6 aa, synthetic construct
SYDVKM

SEQ ID NO: 2473 - protein, 12 aa, synthetic construct
ASSLTFGTTEAF

SEQ ID NO: 2474 - protein, 106 aa, synthetic construct
SRYLVKRTGEKVFLECVQDMDHENMFWYRQDPGLGLRLIYFSYDVKMKEKGDIPEGYSVSREKKERFSLILESASTNQTSMYLCASSLTFGTTEAFFGQGTRLTVV

SEQ ID NO: 2475 - protein, 113 aa, synthetic construct
DVKVTQSSRYLVKRTGEKVFLECVQDMDHENMFWYRQDPGLGLRLIYFSYDVKMKEKGDIPEGYSVSREKKERFSLILESASTNQTSMYLCASSLTFGTTEAFFGQGTRLTVV

SEQ ID NO: 2476 - protein, 132 aa, synthetic construct
  VARIANT 2: note = X can be any Amino Acid
MXIRLLCRVAFCFLAVGLVDVKVTQSSRYLVKRTGEKVFLECVQDMDHENMFWYRQDPGLGLRLIYFSYDVKMKEKGDIPEGYSVSREKKERFSLILESASTNQTSMYLCASSLTFGTTEAFFGQGTRLTVV

SEQ ID NO: 2477 - protein, 132 aa, synthetic construct; identical to SEQ ID NO: 2476
  VARIANT 2: note = X can be any Amino Acid

SEQ ID NO: 2478 - protein, 305 aa, synthetic construct
MGIRLLCRVAFCFLAVGLVDVKVTQSSRYLVKRTGEKVFLECVQDMDHENMFWYRQDPGLGLRLIYFSYDVKMKEKGDIPEGYSVSREKKERFSLILESASTNQTSMYLCASSLTFGTTEAFFGQGTRLTVVEDLRNVTPPKVSLFEPSKAEIANKQKATLVCLARGFFPDHVELSWWVNGKEVHSGVCTDPQAYKESNYSYCLSSRLRVSATFWHNPRNHFRCQVQFHGLSEEDKWPEGSPKPVTQNISAEAWGRADCGITSASYQQGVLSATILYEILLGKATLYAVLVSTLVVMAMVKRKNS

SEQ ID NO: 2479 - protein, 305 aa, synthetic construct
MAIRLLCRVAFCFLAVGLVDVKVTQSSRYLVKRTGEKVFLECVQDMDHENMFWYRQDPGLGLRLIYFSYDVKMKEKGDIPEGYSVSREKKERFSLILESASTNQTSMYLCASSLTFGTTEAFFGQGTRLTVVEDLRNVTPPKVSLFEPSKAEIANKQKATLVCLARGFFPDHVELSWWVNGKEVHSGVCTDPQAYKESNYSYCLSSRLRVSATFWHNPRNHFRCQVQFHGLSEEDKWPEGSPKPVTQNISAEAWGRADCGITSASYQQGVLSATILYEILLGKATLYAVLVSTLVVMAMVKRKNS

SEQ ID NO: 2480 - protein, 305 aa, synthetic construct
MHIRLLCRVAFCFLAVGLVDVKVTQSSRYLVKRTGEKVFLECVQDMDHENMFWYRQDPGLGLRLIYFSYDVKMKEKGDIPEGYSVSREKKERFSLILESASTNQTSMYLCASSLTFGTTEAFFGQGTRLTVVEDLRNVTPPKVSLFEPSKAEIANKQKATLVCLARGFFPDHVELSWWVNGKEVHSGVCTDPQAYKESNYSYCLSSRLRVSATFWHNPRNHFRCQVQFHGLSEEDKWPEGSPKPVTQNISAEAWGRADCGITSASYQQGVLSATILYEILLGKATLYAVLVSTLVVMAMVKRKNS

SEQ ID NO: 2481 - protein, 5 aa, synthetic construct
SGHVS

SEQ ID NO: 2482 - protein, 6 aa, synthetic construct
FQNEAQ

SEQ ID NO: 2483 - protein, 13 aa, synthetic construct
ASSFGSGSTDTQY

SEQ ID NO: 2484 - protein, 113 aa, synthetic construct
GVSQSPRYKVAKRGQDVALRCDPISGHVSLFWYQQALGQGPEFLTYFQNEAQLDKSGLPSDRFFAERPEGSVSTLKIQRTQQEDSAVYLCASSFGSGSTDTQYFGPGTRLTVL

SEQ ID NO: 2485 - protein, 115 aa, synthetic construct
GAGVSQSPRYKVAKRGQDVALRCDPISGHVSLFWYQQALGQGPEFLTYFQNEAQLDKSGLPSDRFFAERPEGSVSTLKIQRTQQEDSAVYLCASSFGSGSTDTQYFGPGTRLTVL

SEQ ID NO: 2486 - protein, 134 aa, synthetic construct
  VARIANT 2: note = X can be any Amino Acid
MXTRLLCWVVLGFLGTDHTGAGVSQSPRYKVAKRGQDVALRCDPISGHVSLFWYQQALGQGPEFLTYFQNEAQLDKSGLPSDRFFAERPEGSVSTLKIQRTQQEDSAVYLCASSFGSGSTDTQYFGPGTRLTVL

SEQ ID NO: 2487 - protein, 134 aa, synthetic construct; identical to SEQ ID NO: 2486
  VARIANT 2: note = X can be any Amino Acid

SEQ ID NO: 2488 - protein, 307 aa, synthetic construct
MGTRLLCWVVLGFLGTDHTGAGVSQSPRYKVAKRGQDVALRCDPISGHVSLFWYQQALGQGPEFLTYFQNEAQLDKSGLPSDRFFAERPEGSVSTLKIQRTQQEDSAVYLCASSFGSGSTDTQYFGPGTRLTVLEDLRNVTPPKVSLFEPSKAEIANKQKATLVCLARGFFPDHVELSWWVNGKEVHSGVCTDPQAYKESNYSYCLSSRLRVSATFWHNPRNHFRCQVQFHGLSEEDKWPEGSPKPVTQNISAEAWGRADCGITSASYQQGVLSATILYEILLGKATLYAVLVSTLVVMAMVKRKNS

SEQ ID NO: 2489 - protein, 307 aa, synthetic construct
MATRLLCWVVLGFLGTDHTGAGVSQSPRYKVAKRGQDVALRCDPISGHVSLFWYQQALGQGPEFLTYFQNEAQLDKSGLPSDRFFAERPEGSVSTLKIQRTQQEDSAVYLCASSFGSGSTDTQYFGPGTRLTVLEDLRNVTPPKVSLFEPSKAEIANKQKATLVCLARGFFPDHVELSWWVNGKEVHSGVCTDPQAYKESNYSYCLSSRLRVSATFWHNPRNHFRCQVQFHGLSEEDKWPEGSPKPVTQNISAEAWGRADCGITSASYQQGVLSATILYEILLGKATLYAVLVSTLVVMAMVKRKNS

SEQ ID NO: 2490 - protein, 307 aa, synthetic construct
MHTRLLCWVVLGFLGTDHTGAGVSQSPRYKVAKRGQDVALRCDPISGHVSLFWYQQALGQGPEFLTYFQNEAQLDKSGLPSDRFFAERPEGSVSTLKIQRTQQEDSAVYLCASSFGSGSTDTQYFGPGTRLTVLEDLRNVTPPKVSLFEPSKAEIANKQKATLVCLARGFFPDHVELSWWVNGKEVHSGVCTDPQAYKESNYSYCLSSRLRVSATFWHNPRNHFRCQVQFHGLSEEDKWPEGSPKPVTQNISAEAWGRADCGITSASYQQGVLSATILYEILLGKATLYAVLVSTLVVMAMVKRKNS

SEQ ID NO: 2491 - protein, 5 aa, synthetic construct
SNHLY

SEQ ID NO: 2492 - protein, 5 aa, synthetic construct
FYNNE

SEQ ID NO: 2493 - protein, 10 aa, synthetic construct
ASRDPAYEQY

SEQ ID NO: 2494 - protein, 112 aa, synthetic construct
EPEVTQTPSHQVTQMGQEVILRCVPISNHLYFYWYRQILGQKVEFLVSFYNNEISEKSEIFDDQFSVERPDGSNFTLKIRSTKLEDSAMYFCASRDPAYEQYFGPGTRLTVT

SEQ ID NO: 2495 - protein, 112 aa, synthetic construct; identical to SEQ ID NO: 2494

SEQ ID NO: 2496 - protein, 131 aa, synthetic construct
  VARIANT 2: note = X can be any Amino Acid
MXTWLVCWAIFSLLKAGLTEPEVTQTPSHQVTQMGQEVILRCVPISNHLYFYWYRQILGQKVEFLVSFYNNEISEKSEIFDDQFSVERPDGSNFTLKIRSTKLEDSAMYFCASRDPAYEQYFGPGTRLTVT

SEQ ID NO: 2497 - protein, 131 aa, synthetic construct; identical to SEQ ID NO: 2496
  VARIANT 2: note = X can be any Amino Acid

SEQ ID NO: 2498 - protein, 304 aa, synthetic construct
MDTWLVCWAIFSLLKAGLTEPEVTQTPSHQVTQMGQEVILRCVPISNHLYFYWYRQILGQKVEFLVSFYNNEISEKSEIFDDQFSVERPDGSNFTLKIRSTKLEDSAMYFCASRDPAYEQYFGPGTRLTVTEDLRNVTPPKVSLFEPSKAEIANKQKATLVCLARGFFPDHVELSWWVNGKEVHSGVCTDPQAYKESNYSYCLSSRLRVSATFWHNPRNHFRCQVQFHGLSEEDKWPEGSPKPVTQNISAEAWGRADCGITSASYQQGVLSATILYEILLGKATLYAVLVSTLVVMAMVKRKNS

SEQ ID NO: 2499 - protein, 304 aa, synthetic construct
MATWLVCWAIFSLLKAGLTEPEVTQTPSHQVTQMGQEVILRCVPISNHLYFYWYRQILGQKVEFLVSFYNNEISEKSEIFDDQFSVERPDGSNFTLKIRSTKLEDSAMYFCASRDPAYEQYFGPGTRLTVTEDLRNVTPPKVSLFEPSKAEIANKQKATLVCLARGFFPDHVELSWWVNGKEVHSGVCTDPQAYKESNYSYCLSSRLRVSATFWHNPRNHFRCQVQFHGLSEEDKWPEGSPKPVTQNISAEAWGRADCGITSASYQQGVLSATILYEILLGKATLYAVLVSTLVVMAMVKRKNS

SEQ ID NO: 2500 - protein, 304 aa, synthetic construct
MHTWLVCWAIFSLLKAGLTEPEVTQTPSHQVTQMGQEVILRCVPISNHLYFYWYRQILGQKVEFLVSFYNNEISEKSEIFDDQFSVERPDGSNFTLKIRSTKLEDSAMYFCASRDPAYEQYFGPGTRLTVTEDLRNVTPPKVSLFEPSKAEIANKQKATLVCLARGFFPDHVELSWWVNGKEVHSGVCTDPQAYKESNYSYCLSSRLRVSATFWHNPRNHFRCQVQFHGLSEEDKWPEGSPKPVTQNISAEAWGRADCGITSASYQQGVLSATILYEILLGKATLYAVLVSTLVVMAMVKRKNS

SEQ ID NO: 2501 - protein, 5 aa, synthetic construct
LNHDA

SEQ ID NO: 2502 - protein, 6 aa, synthetic construct
SQIVND

SEQ ID NO: 2503 - protein, 10 aa, synthetic construct
ASSSRDYEQY

SEQ ID NO: 2504 - protein, 109 aa, synthetic construct
GITQSPKYLFRKEGQNVTLSCEQNLNHDAMYWYRQDPGQGLRLIYYSQIVNDFQKGDIVEGYSVSREKKESFPLTVTSAQKNPTAFYLCASSSRDYEQYFGPGTRLTVT

SEQ ID NO: 2505 - protein, 111 aa, synthetic construct
DGGITQSPKYLFRKEGQNVTLSCEQNLNHDAMYWYRQDPGQGLRLIYYSQIVNDFQKGDIVEGYSVSREKKESFPLTVTSAQKNPTAFYLCASSSRDYEQYFGPGTRLTVT

SEQ ID NO: 2506 - protein, 130 aa, synthetic construct
  VARIANT 2: note = X can be any Amino Acid
MXNQVLCCVVLCFLGANTVDGGITQSPKYLFRKEGQNVTLSCEQNLNHDAMYWYRQDPGQGLRLIYYSQIVNDFQKGDIVEGYSVSREKKESFPLTVTSAQKNPTAFYLCASSSRDYEQYFGPGTRLTVT

SEQ ID NO: 2507 - protein, 130 aa, synthetic construct; identical to SEQ ID NO: 2506
  VARIANT 2: note = X can be any Amino Acid

SEQ ID NO: 2508 - protein, 303 aa, synthetic construct
MSNQVLCCVVLCFLGANTVDGGITQSPKYLFRKEGQNVTLSCEQNLNHDAMYWYRQDPGQGLRLIYYSQIVNDFQKGDIVEGYSVSREKKESFPLTVTSAQKNPTAFYLCASSSRDYEQYFGPGTRLTVTEDLRNVTPPKVSLFEPSKAEIANKQKATLVCLARGFFPDHVELSWWVNGKEVHSGVCTDPQAYKESNYSYCLSSRLRVSATFWHNPRNHFRCQVQFHGLSEEDKWPEGSPKPVTQNISAEAWGRADCGITSASYQQGVLSATILYEILLGKATLYAVLVSTLVVMAMVKRKNS

SEQ ID NO: 2509 - protein, 303 aa, synthetic construct
MANQVLCCVVLCFLGANTVDGGITQSPKYLFRKEGQNVTLSCEQNLNHDAMYWYRQDPGQGLRLIYYSQIVNDFQKGDIVEGYSVSREKKESFPLTVTSAQKNPTAFYLCASSSRDYEQYFGPGTRLTVTEDLRNVTPPKVSLFEPSKAEIANKQKATLVCLARGFFPDHVELSWWVNGKEVHSGVCTDPQAYKESNYSYCLSSRLRVSATFWHNPRNHFRCQVQFHGLSEEDKWPEGSPKPVTQNISAEAWGRADCGITSASYQQGVLSATILYEILLGKATLYAVLVSTLVVMAMVKRKNS

SEQ ID NO: 2510 - protein, 303 aa, synthetic construct
MHNQVLCCVVLCFLGANTVDGGITQSPKYLFRKEGQNVTLSCEQNLNHDAMYWYRQDPGQGLRLIYYSQIVNDFQKGDIVEGYSVSREKKESFPLTVTSAQKNPTAFYLCASSSRDYEQYFGPGTRLTVTEDLRNVTPPKVSLFEPSKAEIANKQKATLVCLARGFFPDHVELSWWVNGKEVHSGVCTDPQAYKESNYSYCLSSRLRVSATFWHNPRNHFRCQVQFHGLSEEDKWPEGSPKPVTQNISAEAWGRADCGITSASYQQGVLSATILYEILLGKATLYAVLVSTLVVMAMVKRKNS

SEQ ID NO: 2511 - protein, 5 aa, synthetic construct
MNHNS

SEQ ID NO: 2512 - protein, 6 aa, synthetic construct
SASEGT

SEQ ID NO: 2513 - protein, 9 aa, synthetic construct
ASIGGFEAF

SEQ ID NO: 2514 - protein, 108 aa, synthetic construct
GVTQTPKFQVLKTGQSMTLQCAQDMNHNSMYWYRQDPGMGLRLIYYSASEGTTDKGEVPNGYNVSRLNKREFSLRLESAAPSQTSVYFCASIGGFEAFFGQGTRLTVV

SEQ ID NO: 2515 - protein, 110 aa, synthetic construct
NAGVTQTPKFQVLKTGQSMTLQCAQDMNHNSMYWYRQDPGMGLRLIYYSASEGTTDKGEVPNGYNVSRLNKREFSLRLESAAPSQTSVYFCASIGGFEAFFGQGTRLTVV

SEQ ID NO: 2516 - protein, 129 aa, synthetic construct
  VARIANT 2: note = X can be any Amino Acid
MXIGLLCCVAFSLLWASPVNAGVTQTPKFQVLKTGQSMTLQCAQDMNHNSMYWYRQDPGMGLRLIYYSASEGTTDKGEVPNGYNVSRLNKREFSLRLESAAPSQTSVYFCASIGGFEAFFGQGTRLTVV

SEQ ID NO: 2517 - protein, 129 aa, synthetic construct; identical to SEQ ID NO: 2516
  VARIANT 2: note = X can be any Amino Acid

SEQ ID NO: 2518 - protein, 302 aa, synthetic construct
MSIGLLCCVAFSLLWASPVNAGVTQTPKFQVLKTGQSMTLQCAQDMNHNSMYWYRQDPGMGLRLIYYSASEGTTDKGEVPNGYNVSRLNKREFSLRLESAAPSQTSVYFCASIGGFEAFFGQGTRLTVVEDLRNVTPPKVSLFEPSKAEIANKQKATLVCLARGFFPDHVELSWWVNGKEVHSGVCTDPQAYKESNYSYCLSSRLRVSATFWHNPRNHFRCQVQFHGLSEEDKWPEGSPKPVTQNISAEAWGRADCGITSASYQQGVLSATILYEILLGKATLYAVLVSTLVVMAMVKRKNS

SEQ ID NO: 2519 - protein, 302 aa, synthetic construct
MAIGLLCCVAFSLLWASPVNAGVTQTPKFQVLKTGQSMTLQCAQDMNHNSMYWYRQDPGMGLRLIYYSASEGTTDKGEVPNGYNVSRLNKREFSLRLESAAPSQTSVYFCASIGGFEAFFGQGTRLTVVEDLRNVTPPKVSLFEPSKAEIANKQKATLVCLARGFFPDHVELSWWVNGKEVHSGVCTDPQAYKESNYSYCLSSRLRVSATFWHNPRNHFRCQVQFHGLSEEDKWPEGSPKPVTQNISAEAWGRADCGITSASYQQGVLSATILYEILLGKATLYAVLVSTLVVMAMVKRKNS

SEQ ID NO: 2520 - protein, 302 aa, synthetic construct
MHIGLLCCVAFSLLWASPVNAGVTQTPKFQVLKTGQSMTLQCAQDMNHNSMYWYRQDPGMGLRLIYYSASEGTTDKGEVPNGYNVSRLNKREFSLRLESAAPSQTSVYFCASIGGFEAFFGQGTRLTVVEDLRNVTPPKVSLFEPSKAEIANKQKATLVCLARGFFPDHVELSWWVNGKEVHSGVCTDPQAYKESNYSYCLSSRLRVSATFWHNPRNHFRCQVQFHGLSEEDKWPEGSPKPVTQNISAEAWGRADCGITSASYQQGVLSATILYEILLGKATLYAVLVSTLVVMAMVKRKNS

SEQ ID NO: 2521 - protein, 5 aa, synthetic construct
SGHAT

SEQ ID NO: 2522 - protein, 6 aa, synthetic construct
FQNNGV

SEQ ID NO: 2523 - protein, 13 aa, synthetic construct
ASSLGTGSTDTQY

SEQ ID NO: 2524 - protein, 113 aa, synthetic construct
GVAQSPRYKIIEKRQSVAFWCNPISGHATLYWYQQILGQGPKLLIQFQNNGVVDDSQLPKDRFSAERLKGVDSTLKIQPAKLEDSAVYLCASSLGTGSTDTQYFGPGTRLTVL

SEQ ID NO: 2525 - protein, 115 aa, synthetic construct
EAGVAQSPRYKIIEKRQSVAFWCNPISGHATLYWYQQILGQGPKLLIQFQNNGVVDDSQLPKDRFSAERLKGVDSTLKIQPAKLEDSAVYLCASSLGTGSTDTQYFGPGTRLTVL

SEQ ID NO: 2526 - protein, 134 aa, synthetic construct
  VARIANT 2: note = X can be any Amino Acid
MXTRLLCWAALCLLGAELTEAGVAQSPRYKIIEKRQSVAFWCNPISGHATLYWYQQILGQGPKLLIQFQNNGVVDDSQLPKDRFSAERLKGVDSTLKIQPAKLEDSAVYLCASSLGTGSTDTQYFGPGTRLTVL

SEQ ID NO: 2527 - protein, 134 aa, synthetic construct; identical to SEQ ID NO: 2526
  VARIANT 2: note = X can be any Amino Acid

SEQ ID NO: 2528 - protein, 307 aa, synthetic construct
MGTRLLCWAALCLLGAELTEAGVAQSPRYKIIEKRQSVAFWCNPISGHATLYWYQQILGQGPKLLIQFQNNGVVDDSQLPKDRFSAERLKGVDSTLKIQPAKLEDSAVYLCASSLGTGSTDTQYFGPGTRLTVLEDLRNVTPPKVSLFEPSKAEIANKQKATLVCLARGFFPDHVELSWWVNGKEVHSGVCTDPQAYKESNYSYCLSSRLRVSATFWHNPRNHFRCQVQFHGLSEEDKWPEGSPKPVTQNISAEAWGRADCGITSASYQQGVLSATILYEILLGKATLYAVLVSTLVVMAMVKRKNS

SEQ ID NO: 2529 - protein, 307 aa, synthetic construct
MATRLLCWAALCLLGAELTEAGVAQSPRYKIIEKRQSVAFWCNPISGHATLYWYQQILGQGPKLLIQFQNNGVVDDSQLPKDRFSAERLKGVDSTLKIQPAKLEDSAVYLCASSLGTGSTDTQYFGPGTRLTVLEDLRNVTPPKVSLFEPSKAEIANKQKATLVCLARGFFPDHVELSWWVNGKEVHSGVCTDPQAYKESNYSYCLSSRLRVSATFWHNPRNHFRCQVQFHGLSEEDKWPEGSPKPVTQNISAEAWGRADCGITSASYQQGVLSATILYEILLGKATLYAVLVSTLVVMAMVKRKNS

SEQ ID NO: 2530 - protein, 307 aa, synthetic construct
MHTRLLCWAALCLLGAELTEAGVAQSPRYKIIEKRQSVAFWCNPISGHATLYWYQQILGQGPKLLIQFQNNGVVDDSQLPKDRFSAERLKGVDSTLKIQPAKLEDSAVYLCASSLGTGSTDTQYFGPGTRLTVLEDLRNVTPPKVSLFEPSKAEIANKQKATLVCLARGFFPDHVELSWWVNGKEVHSGVCTDPQAYKESNYSYCLSSRLRVSATFWHNPRNHFRCQVQFHGLSEEDKWPEGSPKPVTQNISAEAWGRADCGITSASYQQGVLSATILYEILLGKATLYAVLVSTLVVMAMVKRKNS

SEQ ID NO: 2531 - protein, 5 aa, synthetic construct
LNHDA

SEQ ID NO: 2532 - protein, 6 aa, synthetic construct
SQIVND

SEQ ID NO: 2533 - protein, 10 aa, synthetic construct
ASSSRDYEQY

SEQ ID NO: 2534 - protein, 109 aa, synthetic construct; identical to SEQ ID NO: 2504

SEQ ID NO: 2535 - protein, 111 aa, synthetic construct; identical to SEQ ID NO: 2505

SEQ ID NO: 2536 - protein, 130 aa, synthetic construct; identical to SEQ ID NO: 2506
  VARIANT 2: note = X can be any Amino Acid

SEQ ID NO: 2537 - protein, 130 aa, synthetic construct; identical to SEQ ID NO: 2506
  VARIANT 2: note = X can be any Amino Acid

SEQ ID NO: 2538 - protein, 303 aa, synthetic construct; identical to SEQ ID NO: 2508

SEQ ID NO: 2539 - protein, 303 aa, synthetic construct; identical to SEQ ID NO: 2509

SEQ ID NO: 2540 - protein, 303 aa, synthetic construct; identical to SEQ ID NO: 2510

SEQ ID NO: 2541 - protein, 5 aa, synthetic construct
LGHNA

SEQ ID NO: 2542 - protein, 6 aa, synthetic construct
YSLEER

SEQ ID NO: 2543 - protein, 10 aa, synthetic construct
ASSQEDNEQF

SEQ ID NO: 2544 - protein, 116 aa, synthetic construct
ELVPMETGVTQTPRHLVMGMTNKKSLKCEQHLGHNAMYWYKQSAKKPLELMFVYSLEERVENNSVPSRFSPECPNSSHLFLHLHTLQPEDSALYLCASSQEDNEQFFGPGTRLTVL

SEQ ID NO: 2545 - protein, 111 aa, synthetic construct
ETGVTQTPRHLVMGMTNKKSLKCEQHLGHNAMYWYKQSAKKPLELMFVYSLEERVENNSVPSRFSPECPNSSHLFLHLHTLQPEDSALYLCASSQEDNEQFFGPGTRLTVL

SEQ ID NO: 2546 - protein, 133 aa, synthetic construct
  VARIANT 2: note = X can be any Amino Acid
MXCRLLCCAVLCLLGAGELVPMETGVTQTPRHLVMGMTNKKSLKCEQHLGHNAMYWYKQSAKKPLELMFVYSLEERVENNSVPSRFSPECPNSSHLFLHLHTLQPEDSALYLCASSQEDNEQFFGPGTRLTVL

SEQ ID NO: 2547 - protein, 133 aa, synthetic construct; identical to SEQ ID NO: 2546
  VARIANT 2: note = X can be any Amino Acid

SEQ ID NO: 2548 - protein, 306 aa, synthetic construct
MGCRLLCCAVLCLLGAGELVPMETGVTQTPRHLVMGMTNKKSLKCEQHLGHNAMYWYKQSAKKPLELMFVYSLEERVENNSVPSRFSPECPNSSHLFLHLHTLQPEDSALYLCASSQEDNEQFFGPGTRLTVLEDLRNVTPPKVSLFEPSKAEIANKQKATLVCLARGFFPDHVELSWWVNGKEVHSGVCTDPQAYKESNYSYCLSSRLRVSATFWHNPRNHFRCQVQFHGLSEEDKWPEGSPKPVTQNISAEAWGRADCGITSASYQQGVLSATILYEILLGKATLYAVLVSTLVVMAMVKRKNS

SEQ ID NO: 2549 - protein, 306 aa, synthetic construct
MACRLLCCAVLCLLGAGELVPMETGVTQTPRHLVMGMTNKKSLKCEQHLGHNAMYWYKQSAKKPLELMFVYSLEERVENNSVPSRFSPECPNSSHLFLHLHTLQPEDSALYLCASSQEDNEQFFGPGTRLTVLEDLRNVTPPKVSLFEPSKAEIANKQKATLVCLARGFFPDHVELSWWVNGKEVHSGVCTDPQAYKESNYSYCLSSRLRVSATFWHNPRNHFRCQVQFHGLSEEDKWPEGSPKPVTQNISAEAWGRADCGITSASYQQGVLSATILYEILLGKATLYAVLVSTLVVMAMVKRKNS

SEQ ID NO: 2550 - protein, 306 aa, synthetic construct
MHCRLLCCAVLCLLGAGELVPMETGVTQTPRHLVMGMTNKKSLKCEQHLGHNAMYWYKQSAKKPLELMFVYSLEERVENNSVPSRFSPECPNSSHLFLHLHTLQPEDSALYLCASSQEDNEQFFGPGTRLTVLEDLRNVTPPKVSLFEPSKAEIANKQKATLVCLARGFFPDHVELSWWVNGKEVHSGVCTDPQAYKESNYSYCLSSRLRVSATFWHNPRNHFRCQVQFHGLSEEDKWPEGSPKPVTQNISAEAWGRADCGITSASYQQGVLSATILYEILLGKATLYAVLVSTLVVMAMVKRKNS

SEQ ID NO: 2551 - protein, 5 aa, synthetic construct
SGHVS

SEQ ID NO: 2552 - protein, 5 aa, synthetic construct
FNYEA

SEQ ID NO: 2553 - protein, 13 aa, synthetic construct
ASSHREPHTGELF

SEQ ID NO: 2554 - protein, 113 aa, synthetic construct
GVSQSPRYKVTKRGQDVALRCDPISGHVSLYWYRQALGQGPEFLTYFNYEAQQDKSGLPNDRFSAERPEGSISTLTIQRTEQRDSAMYRCASSHREPHTGELFFGEGSRLTVL

SEQ ID NO: 2555 - protein, 115 aa, synthetic construct
GAGVSQSPRYKVTKRGQDVALRCDPISGHVSLYWYRQALGQGPEFLTYFNYEAQQDKSGLPNDRFSAERPEGSISTLTIQRTEQRDSAMYRCASSHREPHTGELFFGEGSRLTVL

SEQ ID NO: 2556 - protein, 134 aa, synthetic construct
  VARIANT 2: note = X can be any Amino Acid
MXTSLLCWVVLGFLGTDHTGAGVSQSPRYKVTKRGQDVALRCDPISGHVSLYWYRQALGQGPEFLTYFNYEAQQDKSGLPNDRFSAERPEGSISTLTIQRTEQRDSAMYRCASSHREPHTGELFFGEGSRLTVL

SEQ ID NO: 2557 - protein, 134 aa, synthetic construct; identical to SEQ ID NO: 2556
  VARIANT 2: note = X can be any Amino Acid

SEQ ID NO: 2558 - protein, 307 aa, synthetic construct
MGTSLLCWVVLGFLGTDHTGAGVSQSPRYKVTKRGQDVALRCDPISGHVSLYWYRQALGQGPEFLTYFNYEAQQDKSGLPNDRFSAERPEGSISTLTIQRTEQRDSAMYRCASSHREPHTGELFFGEGSRLTVLEDLRNVTPPKVSLFEPSKAEIANKQKATLVCLARGFFPDHVELSWWVNGKEVHSGVCTDPQAYKESNYSYCLSSRLRVSATFWHNPRNHFRCQVQFHGLSEEDKWPEGSPKPVTQNISAEAWGRADCGITSASYQQGVLSATILYEILLGKATLYAVLVSTLVVMAMVKRKNS

SEQ ID NO: 2559 - protein, 307 aa, synthetic construct
MATSLLCWVVLGFLGTDHTGAGVSQSPRYKVTKRGQDVALRCDPISGHVSLYWYRQALGQGPEFLTYFNYEAQQDKSGLPNDRFSAERPEGSISTLTIQRTEQRDSAMYRCASSHREPHTGELFFGEGSRLTVLEDLRNVTPPKVSLFEPSKAEIANKQKATLVCLARGFFPDHVELSWWVNGKEVHSGVCTDPQAYKESNYSYCLSSRLRVSATFWHNPRNHFRCQVQFHGLSEEDKWPEGSPKPVTQNISAEAWGRADCGITSASYQQGVLSATILYEILLGKATLYAVLVSTLVVMAMVKRKNS

SEQ ID NO: 2560 - protein, 307 aa, synthetic construct
MHTSLLCWVVLGFLGTDHTGAGVSQSPRYKVTKRGQDVALRCDPISGHVSLYWYRQALGQGPEFLTYFNYEAQQDKSGLPNDRFSAERPEGSISTLTIQRTEQRDSAMYRCASSHREPHTGELFFGEGSRLTVLEDLRNVTPPKVSLFEPSKAEIANKQKATLVCLARGFFPDHVELSWWVNGKEVHSGVCTDPQAYKESNYSYCLSSRLRVSATFWHNPRNHFRCQVQFHGLSEEDKWPEGSPKPVTQNISAEAWGRADCGITSASYQQGVLSATILYEILLGKATLYAVLVSTLVVMAMVKRKNS

SEQ ID NO: 2561 - protein, 5 aa, synthetic construct
SGHAT

SEQ ID NO: 2562 - protein, 6 aa, synthetic construct
FQNNGV

SEQ ID NO: 2563 - protein, 13 aa, synthetic construct
ASNLGGGSTDTQY

SEQ ID NO: 2564 - protein, 113 aa, synthetic construct
GVAQSPRYKIIEKRQSVAFWCNPISGHATLYWYQQILGQGPKLLIQFQNNGVVDDSQLPKDRFSAERLKGVDSTLKIQPAKLEDSAVYLCASNLGGGSTDTQYFGPGTRLTVL

SEQ ID NO: 2565 - protein, 115 aa, synthetic construct
EAGVAQSPRYKIIEKRQSVAFWCNPISGHATLYWYQQILGQGPKLLIQFQNNGVVDDSQLPKDRFSAERLKGVDSTLKIQPAKLEDSAVYLCASNLGGGSTDTQYFGPGTRLTVL

SEQ ID NO: 2566 - protein, 134 aa, synthetic construct
  VARIANT 2: note = X can be any Amino Acid
MXTRLLCWAALCLLGAELTEAGVAQSPRYKIIEKRQSVAFWCNPISGHATLYWYQQILGQGPKLLIQFQNNGVVDDSQLPKDRFSAERLKGVDSTLKIQPAKLEDSAVYLCASNLGGGSTDTQYFGPGTRLTVL

SEQ ID NO: 2567 - protein, 134 aa, synthetic construct; identical to SEQ ID NO: 2566
  VARIANT 2: note = X can be any Amino Acid

SEQ ID NO: 2568 - protein, 307 aa, synthetic construct
MGTRLLCWAALCLLGAELTEAGVAQSPRYKIIEKRQSVAFWCNPISGHATLYWYQQILGQGPKLLIQFQNNGVVDDSQLPKDRFSAERLKGVDSTLKIQPAKLEDSAVYLCASNLGGGSTDTQYFGPGTRLTVLEDLRNVTPPKVSLFEPSKAEIANKQKATLVCLARGFFPDHVELSWWVNGKEVHSGVCTDPQAYKESNYSYCLSSRLRVSATFWHNPRNHFRCQVQFHGLSEEDKWPEGSPKPVTQNISAEAWGRADCGITSASYQQGVLSATILYEILLGKATLYAVLVSTLVVMAMVKRKNS

SEQ ID NO: 2569 - protein, 307 aa, synthetic construct
MATRLLCWAALCLLGAELTEAGVAQSPRYKIIEKRQSVAFWCNPISGHATLYWYQQILGQGPKLLIQFQNNGVVDDSQLPKDRFSAERLKGVDSTLKIQPAKLEDSAVYLCASNLGGGSTDTQYFGPGTRLTVLEDLRNVTPPKVSLFEPSKAEIANKQKATLVCLARGFFPDHVELSWWVNGKEVHSGVCTDPQAYKESNYSYCLSSRLRVSATFWHNPRNHFRCQVQFHGLSEEDKWPEGSPKPVTQNISAEAWGRADCGITSASYQQGVLSATILYEILLGKATLYAVLVSTLVVMAMVKRKNS

SEQ ID NO: 2570 - protein, 307 aa, synthetic construct
MHTRLLCWAALCLLGAELTEAGVAQSPRYKIIEKRQSVAFWCNPISGHATLYWYQQILGQGPKLLIQFQNNGVVDDSQLPKDRFSAERLKGVDSTLKIQPAKLEDSAVYLCASNLGGGSTDTQYFGPGTRLTVLEDLRNVTPPKVSLFEPSKAEIANKQKATLVCLARGFFPDHVELSWWVNGKEVHSGVCTDPQAYKESNYSYCLSSRLRVSATFWHNPRNHFRCQVQFHGLSEEDKWPEGSPKPVTQNISAEAWGRADCGITSASYQQGVLSATILYEILLGKATLYAVLVSTLVVMAMVKRKNS

SEQ ID NO: 2571 - protein, 5 aa, synthetic construct
LGHNA

SEQ ID NO: 2572 - protein, 6 aa, synthetic construct
YSLEER

SEQ ID NO: 2573 - protein, 15 aa, synthetic construct
ASSQDVTSEWVDTIY

SEQ ID NO: 2574 - protein, 121 aa, synthetic construct
ELVPMETGVTQTPRHLVMGMTNKKSLKCEQHLGHNAMYWYKQSAKKPLELMFVYSLEERVENNSVPSRFSPECPNSSHLFLHLHTLQPEDSALYLCASSQDVTSEWVDTIYFGEGSWLTVV

SEQ ID NO: 2575 - protein, 116 aa, synthetic construct
ETGVTQTPRHLVMGMTNKKSLKCEQHLGHNAMYWYKQSAKKPLELMFVYSLEERVENNSVPSRFSPECPNSSHLFLHLHTLQPEDSALYLCASSQDVTSEWVDTIYFGEGSWLTVV

SEQ ID NO: 2576 - protein, 138 aa, synthetic construct
  VARIANT 2: note = X can be any Amino Acid
MXCRLLCCAVLCLLGAGELVPMETGVTQTPRHLVMGMTNKKSLKCEQHLGHNAMYWYKQSAKKPLELMFVYSLEERVENNSVPSRFSPECPNSSHLFLHLHTLQPEDSALYLCASSQDVTSEWVDTIYFGEGSWLTVV

SEQ ID NO: 2577 - protein, 138 aa, synthetic construct; identical to SEQ ID NO: 2576
  VARIANT 2: note = X can be any Amino Acid

SEQ ID NO: 2578 - protein, 311 aa, synthetic construct
MGCRLLCCAVLCLLGAGELVPMETGVTQTPRHLVMGMTNKKSLKCEQHLGHNAMYWYKQSAKKPLELMFVYSLEERVENNSVPSRFSPECPNSSHLFLHLHTLQPEDSALYLCASSQDVTSEWVDTIYFGEGSWLTVVEDLRNVTPPKVSLFEPSKAEIANKQKATLVCLARGFFPDHVELSWWVNGKEVHSGVCTDPQAYKESNYSYCLSSRLRVSATFWHNPRNHFRCQVQFHGLSEEDKWPEGSPKPVTQNISAEAWGRADCGITSASYQQGVLSATILYEILLGKATLYAVLVSTLVVMAMVKRKNS

SEQ ID NO: 2579 - protein, 311 aa, synthetic construct
MACRLLCCAVLCLLGAGELVPMETGVTQTPRHLVMGMTNKKSLKCEQHLGHNAMYWYKQSAKKPLELMFVYSLEERVENNSVPSRFSPECPNSSHLFLHLHTLQPEDSALYLCASSQDVTSEWVDTIYFGEGSWLTVVEDLRNVTPPKVSLFEPSKAEIANKQKATLVCLARGFFPDHVELSWWVNGKEVHSGVCTDPQAYKESNYSYCLSSRLRVSATFWHNPRNHFRCQVQFHGLSEEDKWPEGSPKPVTQNISAEAWGRADCGITSASYQQGVLSATILYEILLGKATLYAVLVSTLVVMAMVKRKNS

SEQ ID NO: 2580 - protein, 311 aa, synthetic construct
MHCRLLCCAVLCLLGAGELVPMETGVTQTPRHLVMGMTNKKSLKCEQHLGHNAMYWYKQSAKKPLELMFVYSLEERVENNSVPSRFSPECPNSSHLFLHLHTLQPEDSALYLCASSQDVTSEWVDTIYFGEGSWLTVVEDLRNVTPPKVSLFEPSKAEIANKQKATLVCLARGFFPDHVELSWWVNGKEVHSGVCTDPQAYKESNYSYCLSSRLRVSATFWHNPRNHFRCQVQFHGLSEEDKWPEGSPKPVTQNISAEAWGRADCGITSASYQQGVLSATILYEILLGKATLYAVLVSTLVVMAMVKRKNS

SEQ ID NO: 2581 - protein, 5 aa, synthetic construct
MNHEY

SEQ ID NO: 2582 - protein, 6 aa, synthetic construct
SVGAGI

SEQ ID NO: 2583 - protein, 10 aa, synthetic construct
ASRNLGDTQY

SEQ ID NO: 2584 - protein, 109 aa, synthetic construct
GVTQTPKFQVLKTGQSMTLQCAQDMNHEYMSWYRQDPGMGLRLIHYSVGAGITDQGEVPNGYNVSRSTTEDFPLRLLSAAPSQTSVYFCASRNLGDTQYFGPGTRLTVL

SEQ ID NO: 2585 - protein, 111 aa, synthetic construct
NAGVTQTPKFQVLKTGQSMTLQCAQDMNHEYMSWYRQDPGMGLRLIHYSVGAGITDQGEVPNGYNVSRSTTEDFPLRLLSAAPSQTSVYFCASRNLGDTQYFGPGTRLTVL

SEQ ID NO: 2586 - protein, 130 aa, synthetic construct
  VARIANT 2: note = X can be any Amino Acid
MXIGLLCCAALSLLWAGPVNAGVTQTPKFQVLKTGQSMTLQCAQDMNHEYMSWYRQDPGMGLRLIHYSVGAGITDQGEVPNGYNVSRSTTEDFPLRLLSAAPSQTSVYFCASRNLGDTQYFGPGTRLTVL

SEQ ID NO: 2587 - protein, 130 aa, synthetic construct; identical to SEQ ID NO: 2586
  VARIANT 2: note = X can be any Amino Acid

SEQ ID NO: 2588 - protein, 303 aa, synthetic construct
MSIGLLCCAALSLLWAGPVNAGVTQTPKFQVLKTGQSMTLQCAQDMNHEYMSWYRQDPGMGLRLIHYSVGAGITDQGEVPNGYNVSRSTTEDFPLRLLSAAPSQTSVYFCASRNLGDTQYFGPGTRLTVLEDLRNVTPPKVSLFEPSKAEIANKQKATLVCLARGFFPDHVELSWWVNGKEVHSGVCTDPQAYKESNYSYCLSSRLRVSATFWHNPRNHFRCQVQFHGLSEEDKWPEGSPKPVTQNISAEAWGRADCGITSASYQQGVLSATILYEILLGKATLYAVLVSTLVVMAMVKRKNS

SEQ ID NO: 2589 - protein, 303 aa, synthetic construct
MAIGLLCCAALSLLWAGPVNAGVTQTPKFQVLKTGQSMTLQCAQDMNHEYMSWYRQDPGMGLRLIHYSVGAGITDQGEVPNGYNVSRSTTEDFPLRLLSAAPSQTSVYFCASRNLGDTQYFGPGTRLTVLEDLRNVTPPKVSLFEPSKAEIANKQKATLVCLARGFFPDHVELSWWVNGKEVHSGVCTDPQAYKESNYSYCLSSRLRVSATFWHNPRNHFRCQVQFHGLSEEDKWPEGSPKPVTQNISAEAWGRADCGITSASYQQGVLSATILYEILLGKATLYAVLVSTLVVMAMVKRKNS

SEQ ID NO: 2590 - protein, 303 aa, synthetic construct
MHIGLLCCAALSLLWAGPVNAGVTQTPKFQVLKTGQSMTLQCAQDMNHEYMSWYRQDPGMGLRLIHYSVGAGITDQGEVPNGYNVSRSTTEDFPLRLLSAAPSQTSVYFCASRNLGDTQYFGPGTRLTVLEDLRNVTPPKVSLFEPSKAEIANKQKATLVCLARGFFPDHVELSWWVNGKEVHSGVCTDPQAYKESNYSYCLSSRLRVSATFWHNPRNHFRCQVQFHGLSEEDKWPEGSPKPVTQNISAEAWGRADCGITSASYQQGVLSATILYEILLGKATLYAVLVSTLVVMAMVKRKNS

SEQ ID NO: 2591 - protein, 6 aa, synthetic construct
DFQATT

SEQ ID NO: 2592 - protein, 7 aa, synthetic construct
SNEGSKA

SEQ ID NO: 2593 - protein, 12 aa, synthetic construct
SASRGATGQPQH

SEQ ID NO: 2594 - protein, 120 aa, synthetic construct
GSGLGAVVSQHPSWVICKSGTSVKIECRSLDFQATTMFWYRQFPKQSLMLMATSNEGSKATYEQGVEKDKFLINHASLTLSTLTVTSAHPEDSSFYICSASRGATGQPQHFGDGTRLSIL

SEQ ID NO: 2595 - protein, 116 aa, synthetic construct
GAVVSQHPSWVICKSGTSVKIECRSLDFQATTMFWYRQFPKQSLMLMATSNEGSKATYEQGVEKDKFLINHASLTLSTLTVTSAHPEDSSFYICSASRGATGQPQHFGDGTRLSIL

SEQ ID NO: 2596 - protein, 141 aa, synthetic construct
  VARIANT 2: note = X can be any Amino Acid
MXLLLLLLGPGISLLLPGSLAGSGLGAVVSQHPSWVICKSGTSVKIECRSLDFQATTMFWYRQFPKQSLMLMATSNEGSKATYEQGVEKDKFLINHASLTLSTLTVTSAHPEDSSFYICSASRGATGQPQHFGDGTRLSIL

SEQ ID NO: 2597 - protein, 141 aa, synthetic construct; identical to SEQ ID NO: 2596
  VARIANT 2: note = X can be any Amino Acid

SEQ ID NO: 2598 - protein, 314 aa, synthetic construct
MLLLLLLLGPGISLLLPGSLAGSGLGAVVSQHPSWVICKSGTSVKIECRSLDFQATTMFWYRQFPKQSLMLMATSNEGSKATYEQGVEKDKFLINHASLTLSTLTVTSAHPEDSSFYICSASRGATGQPQHFGDGTRLSILEDLRNVTPPKVSLFEPSKAEIANKQKATLVCLARGFFPDHVELSWWVNGKEVHSGVCTDPQAYKESNYSYCLSSRLRVSATFWHNPRNHFRCQVQFHGLSEEDKWPEGSPKPVTQNISAEAWGRADCGITSASYQQGVLSATILYEILLGKATLYAVLVSTLVVMAMVKRKNS

SEQ ID NO: 2599 - protein, 314 aa, synthetic construct
MALLLLLLGPGISLLLPGSLAGSGLGAVVSQHPSWVICKSGTSVKIECRSLDFQATTMFWYRQFPKQSLMLMATSNEGSKATYEQGVEKDKFLINHASLTLSTLTVTSAHPEDSSFYICSASRGATGQPQHFGDGTRLSILEDLRNVTPPKVSLFEPSKAEIANKQKATLVCLARGFFPDHVELSWWVNGKEVHSGVCTDPQAYKESNYSYCLSSRLRVSATFWHNPRNHFRCQVQFHGLSEEDKWPEGSPKPVTQNISAEAWGRADCGITSASYQQGVLSATILYEILLGKATLYAVLVSTLVVMAMVKRKNS

SEQ ID NO: 2600 - protein, 314 aa, synthetic construct
MHLLLLLLGPGISLLLPGSLAGSGLGAVVSQHPSWVICKSGTSVKIECRSLDFQATTMFWYRQFPKQSLMLMATSNEGSKATYEQGVEKDKFLINHASLTLSTLTVTSAHPEDSSFYICSASRGATGQPQHFGDGTRLSILEDLRNVTPPKVSLFEPSKAEIANKQKATLVCLARGFFPDHVELSWWVNGKEVHSGVCTDPQAYKESNYSYCLSSRLRVSATFWHNPRNHFRCQVQFHGLSEEDKWPEGSPKPVTQNISAEAWGRADCGITSASYQQGVLSATILYEILLGKATLYAVLVSTLVVMAMVKRKNS

SEQ ID NO: 2601 - protein, 6 aa, synthetic construct
SGHDYL

SEQ ID NO: 2602 - protein, 6 aa, synthetic construct
FNNNVP

SEQ ID NO: 2603 - protein, 14 aa, synthetic construct
ASSSYGGYSNQPQH

SEQ ID NO: 2604 - protein, 114 aa, synthetic construct
GVIQSPRHEVTEMGQEVTLRCKPISGHDYLFWYRQTMMRGLELLIYFNNNVPIDDSGMPEDRFSAKMPNASFSTLKIQPSEPRDSAVYFCASSSYGGYSNQPQHFGDGTRLSIL

SEQ ID NO: 2605 - protein, 116 aa, synthetic construct
DAGVIQSPRHEVTEMGQEVTLRCKPISGHDYLFWYRQTMMRGLELLIYFNNNVPIDDSGMPEDRFSAKMPNASFSTLKIQPSEPRDSAVYFCASSSYGGYSNQPQHFGDGTRLSIL

SEQ ID NO: 2606 - protein, 135 aa, synthetic construct
  VARIANT 2: note = X can be any Amino Acid
MXSWTLCCVSLCILVAKHTDAGVIQSPRHEVTEMGQEVTLRCKPISGHDYLFWYRQTMMRGLELLIYFNNNVPIDDSGMPEDRFSAKMPNASFSTLKIQPSEPRDSAVYFCASSSYGGYSNQPQHFGDGTRLSIL

SEQ ID NO: 2607 - protein, 135 aa, synthetic construct; identical to SEQ ID NO: 2606
  VARIANT 2: note = X can be any Amino Acid

SEQ ID NO: 2608 - protein, 308 aa, synthetic construct
MGSWTLCCVSLCILVAKHTDAGVIQSPRHEVTEMGQEVTLRCKPISGHDYLFWYRQTMMRGLELLIYFNNNVPIDDSGMPEDRFSAKMPNASFSTLKIQPSEPRDSAVYFCASSSYGGYSNQPQHFGDGTRLSILEDLRNVTPPKVSLFEPSKAEIANKQKATLVCLARGFFPDHVELSWWVNGKEVHSGVCTDPQAYKESNYSYCLSSRLRVSATFWHNPRNHFRCQVQFHGLSEEDKWPEGSPKPVTQNISAEAWGRADCGITSASYQQGVLSATILYEILLGKATLYAVLVSTLVVMAMVKRKNS

SEQ ID NO: 2609 - protein, 308 aa, synthetic construct
MASWTLCCVSLCILVAKHTDAGVIQSPRHEVTEMGQEVTLRCKPISGHDYLFWYRQTMMRGLELLIYFNNNVPIDDSGMPEDRFSAKMPNASFSTLKIQPSEPRDSAVYFCASSSYGGYSNQPQHFGDGTRLSILEDLRNVTPPKVSLFEPSKAEIANKQKATLVCLARGFFPDHVELSWWVNGKEVHSGVCTDPQAYKESNYSYCLSSRLRVSATFWHNPRNHFRCQVQFHGLSEEDKWPEGSPKPVTQNISAEAWGRADCGITSASYQQGVLSATILYEILLGKATLYAVLVSTLVVMAMVKRKNS

SEQ ID NO: 2610 - protein, 308 aa, synthetic construct
MHSWTLCCVSLCILVAKHTDAGVIQSPRHEVTEMGQEVTLRCKPISGHDYLFWYRQTMMRGLELLIYFNNNVPIDDSGMPEDRFSAKMPNASFSTLKIQPSEPRDSAVYFCASSSYGGYSNQPQHFGDGTRLSILEDLRNVTPPKVSLFEPSKAEIANKQKATLVCLARGFFPDHVELSWWVNGKEVHSGVCTDPQAYKESNYSYCLSSRLRVSATFWHNPRNHFRCQVQFHGLSEEDKWPEGSPKPVTQNISAEAWGRADCGITSASYQQGVLSATILYEILLGKATLYAVLVSTLVVMAMVKRKNS

SEQ ID NO: 2611 - protein, 5 aa, synthetic construct
SGHDT

SEQ ID NO: 2612 - protein, 6 aa, synthetic construct
YYEEEE

SEQ ID NO: 2613 - protein, 13 aa, synthetic construct
ASSLGEGRVDGYT

SEQ ID NO: 2614 - protein, 112 aa, synthetic construct
GVTQSPTHLIKTRGQQVTLRCSPKSGHDTVSWYQQALGQGPQFIFQYYEEEERQRGNFPDRFSGHQFPNYSSELNVNALLLGDSALYLCASSLGEGRVDGYTFGSGTRLTVV

SEQ ID NO: 2615 - protein, 114 aa, synthetic construct
DAGVTQSPTHLIKTRGQQVTLRCSPKSGHDTVSWYQQALGQGPQFIFQYYEEEERQRGNFPDRFSGHQFPNYSSELNVNALLLGDSALYLCASSLGEGRVDGYTFGSGTRLTVV

SEQ ID NO: 2616 - protein, 133 aa, synthetic construct
  VARIANT 2: note = X can be any Amino Acid
MXPGLLCWALLCLLGAGLVDAGVTQSPTHLIKTRGQQVTLRCSPKSGHDTVSWYQQALGQGPQFIFQYYEEEERQRGNFPDRFSGHQFPNYSSELNVNALLLGDSALYLCASSLGEGRVDGYTFGSGTRLTVV

SEQ ID NO: 2617 - protein, 133 aa, synthetic construct; identical to SEQ ID NO: 2616
  VARIANT 2: note = X can be any Amino Acid

SEQ ID NO: 2618 - protein, 306 aa, synthetic construct
MGPGLLCWALLCLLGAGLVDAGVTQSPTHLIKTRGQQVTLRCSPKSGHDTVSWYQQALGQGPQFIFQYYEEEERQRGNFPDRFSGHQFPNYSSELNVNALLLGDSALYLCASSLGEGRVDGYTFGSGTRLTVVEDLRNVTPPKVSLFEPSKAEIANKQKATLVCLARGFFPDHVELSWWVNGKEVHSGVCTDPQAYKESNYSYCLSSRLRVSATFWHNPRNHFRCQVQFHGLSEEDKWPEGSPKPVTQNISAEAWGRADCGITSASYQQGVLSATILYEILLGKATLYAVLVSTLVVMAMVKRKNS

SEQ ID NO: 2619 - protein, 306 aa, synthetic construct
MAPGLLCWALLCLLGAGLVDAGVTQSPTHLIKTRGQQVTLRCSPKSGHDTVSWYQQALGQGPQFIFQYYEEEERQRGNFPDRFSGHQFPNYSSELNVNALLLGDSALYLCASSLGEGRVDGYTFGSGTRLTVVEDLRNVTPPKVSLFEPSKAEIANKQKATLVCLARGFFPDHVELSWWVNGKEVHSGVCTDPQAYKESNYSYCLSSRLRVSATFWHNPRNHFRCQVQFHGLSEEDKWPEGSPKPVTQNISAEAWGRADCGITSASYQQGVLSATILYEILLGKATLYAVLVSTLVVMAMVKRKNS

SEQ ID NO: 2620 - protein, 306 aa, synthetic construct
MHPGLLCWALLCLLGAGLVDAGVTQSPTHLIKTRGQQVTLRCSPKSGHDTVSWYQQALGQGPQFIFQYYEEEERQRGNFPDRFSGHQFPNYSSELNVNALLLGDSALYLCASSLGEGRVDGYTFGSGTRLTVVEDLRNVTPPKVSLFEPSKAEIANKQKATLVCLARGFFPDHVELSWWVNGKEVHSGVCTDPQAYKESNYSYCLSSRLRVSATFWHNPRNHFRCQVQFHGLSEEDKWPEGSPKPVTQNISAEAWGRADCGITSASYQQGVLSATILYEILLGKATLYAVLVSTLVVMAMVKRKNS

SEQ ID NO: 2621 - protein, 5 aa, synthetic construct
SGHDT

SEQ ID NO: 2622 - protein, 6 aa, synthetic construct
YYEEEE

SEQ ID NO: 2623 - protein, 13 aa, synthetic construct
ASSLGRASNQPQH

SEQ ID NO: 2624 - protein, 112 aa, synthetic construct
GVTQSPTHLIKTRGQQVTLRCSPKSGHDTVSWYQQALGQGPQFIFQYYEEEERQRGNFPDRFSGHQFPNYSSELNVNALLLGDSALYLCASSLGRASNQPQHFGDGTRLSIL

SEQ ID NO: 2625 - protein, 114 aa, synthetic construct
DAGVTQSPTHLIKTRGQQVTLRCSPKSGHDTVSWYQQALGQGPQFIFQYYEEEERQRGNFPDRFSGHQFPNYSSELNVNALLLGDSALYLCASSLGRASNQPQHFGDGTRLSIL

SEQ ID NO: 2626 - protein, 133 aa, synthetic construct
  VARIANT 2: note = X can be any Amino Acid
MXPGLLCWALLCLLGAGLVDAGVTQSPTHLIKTRGQQVTLRCSPKSGHDTVSWYQQALGQGPQFIFQYYEEEERQRGNFPDRFSGHQFPNYSSELNVNALLLGDSALYLCASSLGRASNQPQHFGDGTRLSIL

SEQ ID NO: 2627 - protein, 133 aa, synthetic construct; identical to SEQ ID NO: 2626
  VARIANT 2: note = X can be any Amino Acid

SEQ ID NO: 2628 - protein, 306 aa, synthetic construct
MGPGLLCWALLCLLGAGLVDAGVTQSPTHLIKTRGQQVTLRCSPKSGHDTVSWYQQALGQGPQFIFQYYEEEERQRGNFPDRFSGHQFPNYSSELNVNALLLGDSALYLCASSLGRASNQPQHFGDGTRLSILEDLRNVTPPKVSLFEPSKAEIANKQKATLVCLARGFFPDHVELSWWVNGKEVHSGVCTDPQAYKESNYSYCLSSRLRVSATFWHNPRNHFRCQVQFHGLSEEDKWPEGSPKPVTQNISAEAWGRADCGITSASYQQGVLSATILYEILLGKATLYAVLVSTLVVMAMVKRKNS

SEQ ID NO: 2629 - protein, 306 aa, synthetic construct
MAPGLLCWALLCLLGAGLVDAGVTQSPTHLIKTRGQQVTLRCSPKSGHDTVSWYQQALGQGPQFIFQYYEEEERQRGNFPDRFSGHQFPNYSSELNVNALLLGDSALYLCASSLGRASNQPQHFGDGTRLSILEDLRNVTPPKVSLFEPSKAEIANKQKATLVCLARGFFPDHVELSWWVNGKEVHSGVCTDPQAYKESNYSYCLSSRLRVSATFWHNPRNHFRCQVQFHGLSEEDKWPEGSPKPVTQNISAEAWGRADCGITSASYQQGVLSATILYEILLGKATLYAVLVSTLVVMAMVKRKNS

SEQ ID NO: 2630 - protein, 306 aa, synthetic construct
MHPGLLCWALLCLLGAGLVDAGVTQSPTHLIKTRGQQVTLRCSPKSGHDTVSWYQQALGQGPQFIFQYYEEEERQRGNFPDRFSGHQFPNYSSELNVNALLLGDSALYLCASSLGRASNQPQHFGDGTRLSILEDLRNVTPPKVSLFEPSKAEIANKQKATLVCLARGFFPDHVELSWWVNGKEVHSGVCTDPQAYKESNYSYCLSSRLRVSATFWHNPRNHFRCQVQFHGLSEEDKWPEGSPKPVTQNISAEAWGRADCGITSASYQQGVLSATILYEILLGKATLYAVLVSTLVVMAMVKRKNS

SEQ ID NO: 2631 - protein, 5 aa, synthetic construct
SGHDT

SEQ ID NO: 2632 - protein, 6 aa, synthetic construct
YYEEEE

SEQ ID NO: 2633 - protein, 13 aa, synthetic construct
ASSFGQSSTYGYT

SEQ ID NO: 2634 - protein, 112 aa, synthetic construct
GVTQSPTHLIKTRGQQVTLRCSPKSGHDTVSWYQQALGQGPQFIFQYYEEEERQRGNFPDRFSGHQFPNYSSELNVNALLLGDSALYLCASSFGQSSTYGYTFGSGTRLTVV

SEQ ID NO: 2635 - protein, 114 aa, synthetic construct
DAGVTQSPTHLIKTRGQQVTLRCSPKSGHDTVSWYQQALGQGPQFIFQYYEEEERQRGNFPDRFSGHQFPNYSSELNVNALLLGDSALYLCASSFGQSSTYGYTFGSGTRLTVV

SEQ ID NO: 2636 - protein, 133 aa, synthetic construct
  VARIANT 2: note = X can be any Amino Acid
MXPGLLCWALLCLLGAGLVDAGVTQSPTHLIKTRGQQVTLRCSPKSGHDTVSWYQQALGQGPQFIFQYYEEEERQRGNFPDRFSGHQFPNYSSELNVNALLLGDSALYLCASSFGQSSTYGYTFGSGTRLTVV

SEQ ID NO: 2637 - protein, 133 aa, synthetic construct; identical to SEQ ID NO: 2636
  VARIANT 2: note = X can be any Amino Acid

SEQ ID NO: 2638 - protein, 306 aa, synthetic construct
MGPGLLCWALLCLLGAGLVDAGVTQSPTHLIKTRGQQVTLRCSPKSGHDTVSWYQQALGQGPQFIFQYYEEEERQRGNFPDRFSGHQFPNYSSELNVNALLLGDSALYLCASSFGQSSTYGYTFGSGTRLTVVEDLRNVTPPKVSLFEPSKAEIANKQKATLVCLARGFFPDHVELSWWVNGKEVHSGVCTDPQAYKESNYSYCLSSRLRVSATFWHNPRNHFRCQVQFHGLSEEDKWPEGSPKPVTQNISAEAWGRADCGITSASYQQGVLSATILYEILLGKATLYAVLVSTLVVMAMVKRKNS

SEQ ID NO: 2639 - protein, 306 aa, synthetic construct
MAPGLLCWALLCLLGAGLVDAGVTQSPTHLIKTRGQQVTLRCSPKSGHDTVSWYQQALGQGPQFIFQYYEEEERQRGNFPDRFSGHQFPNYSSELNVNALLLGDSALYLCASSFGQSSTYGYTFGSGTRLTVVEDLRNVTPPKVSLFEPSKAEIANKQKATLVCLARGFFPDHVELSWWVNGKEVHSGVCTDPQAYKESNYSYCLSSRLRVSATFWHNPRNHFRCQVQFHGLSEEDKWPEGSPKPVTQNISAEAWGRADCGITSASYQQGVLSATILYEILLGKATLYAVLVSTLVVMAMVKRKNS

SEQ ID NO: 2640 - protein, 306 aa, synthetic construct
MHPGLLCWALLCLLGAGLVDAGVTQSPTHLIKTRGQQVTLRCSPKSGHDTVSWYQQALGQGPQFIFQYYEEEERQRGNFPDRFSGHQFPNYSSELNVNALLLGDSALYLCASSFGQSSTYGYTFGSGTRLTVVEDLRNVTPPKVSLFEPSKAEIANKQKATLVCLARGFFPDHVELSWWVNGKEVHSGVCTDPQAYKESNYSYCLSSRLRVSATFWHNPRNHFRCQVQFHGLSEEDKWPEGSPKPVTQNISAEAWGRADCGITSASYQQGVLSATILYEILLGKATLYAVLVSTLVVMAMVKRKNS

SEQ ID NO: 2641 - protein, 5 aa, synthetic construct
SGHDT

SEQ ID NO: 2642 - protein, 6 aa, synthetic construct
YYEEEE

SEQ ID NO: 2643 - protein, 12 aa, synthetic construct
ASSLGQTNYGYT

SEQ ID NO: 2644 - protein, 111 aa, synthetic construct
GVTQSPTHLIKTRGQQVTLRCSPKSGHDTVSWYQQALGQGPQFIFQYYEEEERQRGNFPDRFSGHQFPNYSSELNVNALLLGDSALYLCASSLGQTNYGYTFGSGTRLTVV

SEQ ID NO: 2645 - protein, 113 aa, synthetic construct
DAGVTQSPTHLIKTRGQQVTLRCSPKSGHDTVSWYQQALGQGPQFIFQYYEEEERQRGNFPDRFSGHQFPNYSSELNVNALLLGDSALYLCASSLGQTNYGYTFGSGTRLTVV

SEQ ID NO: 2646 - protein, 132 aa, synthetic construct
  VARIANT 2: note = X can be any Amino Acid
MXPGLLCWALLCLLGAGLVDAGVTQSPTHLIKTRGQQVTLRCSPKSGHDTVSWYQQALGQGPQFIFQYYEEEERQRGNFPDRFSGHQFPNYSSELNVNALLLGDSALYLCASSLGQTNYGYTFGSGTRLTVV

SEQ ID NO: 2647 - protein, 132 aa, synthetic construct; identical to SEQ ID NO: 2646
  VARIANT 2: note = X can be any Amino Acid

SEQ ID NO: 2648 - protein, 305 aa, synthetic construct
MGPGLLCWALLCLLGAGLVDAGVTQSPTHLIKTRGQQVTLRCSPKSGHDTVSWYQQALGQGPQFIFQYYEEEERQRGNFPDRFSGHQFPNYSSELNVNALLLGDSALYLCASSLGQTNYGYTFGSGTRLTVVEDLRNVTPPKVSLFEPSKAEIANKQKATLVCLARGFFPDHVELSWWVNGKEVHSGVCTDPQAYKESNYSYCLSSRLRVSATFWHNPRNHFRCQVQFHGLSEEDKWPEGSPKPVTQNISAEAWGRADCGITSASYQQGVLSATILYEILLGKATLYAVLVSTLVVMAMVKRKNS

SEQ ID NO: 2649 - protein, 305 aa, synthetic construct
MAPGLLCWALLCLLGAGLVDAGVTQSPTHLIKTRGQQVTLRCSPKSGHDTVSWYQQALGQGPQFIFQYYEEEERQRGNFPDRFSGHQFPNYSSELNVNALLLGDSALYLCASSLGQTNYGYTFGSGTRLTVVEDLRNVTPPKVSLFEPSKAEIANKQKATLVCLARGFFPDHVELSWWVNGKEVHSGVCTDPQAYKESNYSYCLSSRLRVSATFWHNPRNHFRCQVQFHGLSEEDKWPEGSPKPVTQNISAEAWGRADCGITSASYQQGVLSATILYEILLGKATLYAVLVSTLVVMAMVKRKNS

SEQ ID NO: 2650 - protein, 305 aa, synthetic construct
MHPGLLCWALLCLLGAGLVDAGVTQSPTHLIKTRGQQVTLRCSPKSGHDTVSWYQQALGQGPQFIFQYYEEEERQRGNFPDRFSGHQFPNYSSELNVNALLLGDSALYLCASSLGQTNYGYTFGSGTRLTVVEDLRNVTPPKVSLFEPSKAEIANKQKATLVCLARGFFPDHVELSWWVNGKEVHSGVCTDPQAYKESNYSYCLSSRLRVSATFWHNPRNHFRCQVQFHGLSEEDKWPEGSPKPVTQNISAEAWGRADCGITSASYQQGVLSATILYEILLGKATLYAVLVSTLVVMAMVKRKNS

SEQ ID NO: 2651 - protein, 5 aa, synthetic construct
WSHSY

SEQ ID NO: 2652 - protein, 6 aa, synthetic construct
SAAADI

SEQ ID NO: 2653 - protein, 10 aa, synthetic construct
ASSDPGTEAF

SEQ ID NO: 2654 - protein, 109 aa, synthetic construct
GITQSPRYKITETGRQVTLMCHQTWSHSYMFWYRQDLGHGLRLIYYSAAADITDKGEVPDGYVVSRSKTENFPLTLESATRSQTSVYFCASSDPGTEAFFGQGTRLTVV

SEQ ID NO: 2655 - protein, 111 aa, synthetic construct
DAGITQSPRYKITETGRQVTLMCHQTWSHSYMFWYRQDLGHGLRLIYYSAAADITDKGEVPDGYVVSRSKTENFPLTLESATRSQTSVYFCASSDPGTEAFFGQGTRLTVV

SEQ ID NO: 2656 - protein, 130 aa, synthetic construct
  VARIANT 2: note = X can be any Amino Acid
MXTRLFFYVALCLLWAGHRDAGITQSPRYKITETGRQVTLMCHQTWSHSYMFWYRQDLGHGLRLIYYSAAADITDKGEVPDGYVVSRSKTENFPLTLESATRSQTSVYFCASSDPGTEAFFGQGTRLTVV

SEQ ID NO: 2657 - protein, 130 aa, synthetic construct; identical to SEQ ID NO: 2656
  VARIANT 2: note = X can be any Amino Acid

SEQ ID NO: 2658 - protein, 303 aa, synthetic construct
MGTRLFFYVALCLLWAGHRDAGITQSPRYKITETGRQVTLMCHQTWSHSYMFWYRQDLGHGLRLIYYSAAADITDKGEVPDGYVVSRSKTENFPLTLESATRSQTSVYFCASSDPGTEAFFGQGTRLTVVEDLRNVTPPKVSLFEPSKAEIANKQKATLVCLARGFFPDHVELSWWVNGKEVHSGVCTDPQAYKESNYSYCLSSRLRVSATFWHNPRNHFRCQVQFHGLSEEDKWPEGSPKPVTQNISAEAWGRADCGITSASYQQGVLSATILYEILLGKATLYAVLVSTLVVMAMVKRKNS

SEQ ID NO: 2659 - protein, 303 aa, synthetic construct
MATRLFFYVALCLLWAGHRDAGITQSPRYKITETGRQVTLMCHQTWSHSYMFWYRQDLGHGLRLIYYSAAADITDKGEVPDGYVVSRSKTENFPLTLESATRSQTSVYFCASSDPGTEAFFGQGTRLTVVEDLRNVTPPKVSLFEPSKAEIANKQKATLVCLARGFFPDHVELSWWVNGKEVHSGVCTDPQAYKESNYSYCLSSRLRVSATFWHNPRNHFRCQVQFHGLSEEDKWPEGSPKPVTQNISAEAWGRADCGITSASYQQGVLSATILYEILLGKATLYAVLVSTLVVMAMVKRKNS

SEQ ID NO: 2660 - protein, 303 aa, synthetic construct
MHTRLFFYVALCLLWAGHRDAGITQSPRYKITETGRQVTLMCHQTWSHSYMFWYRQDLGHGLRLIYYSAAADITDKGEVPDGYVVSRSKTENFPLTLESATRSQTSVYFCASSDPGTEAFFGQGTRLTVVEDLRNVTPPKVSLFEPSKAEIANKQKATLVCLARGFFPDHVELSWWVNGKEVHSGVCTDPQAYKESNYSYCLSSRLRVSATFWHNPRNHFRCQVQFHGLSEEDKWPEGSPKPVTQNISAEAWGRADCGITSASYQQGVLSATILYEILLGKATLYAVLVSTLVVMAMVKRKNS

SEQ ID NO: 2661 - protein, 5 aa, synthetic construct
LGHDT

SEQ ID NO: 2662 - protein, 6 aa, synthetic construct
YNNKQL

SEQ ID NO: 2663 - protein, 13 aa, synthetic construct
ASSSRDWSAETLY

SEQ ID NO: 2664 - protein, 112 aa, synthetic construct
AVFQTPNYHVTQVGNEVSFNCKQTLGHDTMYWYKQDSKKLLKIMFSYNNKQLIVNETVPRRFSPQSSDKAHLNLRIKSVEPEDSAVYLCASSSRDWSAETLYFGSGTRLTVL

SEQ ID NO: 2665 - protein, 114 aa, synthetic construct
ETAVFQTPNYHVTQVGNEVSFNCKQTLGHDTMYWYKQDSKKLLKIMFSYNNKQLIVNETVPRRFSPQSSDKAHLNLRIKSVEPEDSAVYLCASSSRDWSAETLYFGSGTRLTVL

SEQ ID NO: 2666 - protein, 133 aa, synthetic construct
  VARIANT 2: note = X can be any Amino Acid
MXCRLLSCVAFCLLGIGPLETAVFQTPNYHVTQVGNEVSFNCKQTLGHDTMYWYKQDSKKLLKIMFSYNNKQLIVNETVPRRFSPQSSDKAHLNLRIKSVEPEDSAVYLCASSSRDWSAETLYFGSGTRLTVL

SEQ ID NO: 2667 - protein, 133 aa, synthetic construct; identical to SEQ ID NO: 2666
  VARIANT 2: note = X can be any Amino Acid

SEQ ID NO: 2668 - protein, 306 aa, synthetic construct
MGCRLLSCVAFCLLGIGPLETAVFQTPNYHVTQVGNEVSFNCKQTLGHDTMYWYKQDSKKLLKIMFSYNNKQLIVNETVPRRFSPQSSDKAHLNLRIKSVEPEDSAVYLCASSSRDWSAETLYFGSGTRLTVLEDLRNVTPPKVSLFEPSKAEIANKQKATLVCLARGFFPDHVELSWWVNGKEVHSGVSTDPQAYKESNYSYCLSSRLRVSATFWHNPRNHFRCQVQFHGLSEEDKWPEGSPKPVTQNISAEAWGRADCGITSASYHQGVLSATILYEILLGKATLYAVLVSGLVLMAMVKKKNS

SEQ ID NO: 2669 - protein, 306 aa, synthetic construct
MACRLLSCVAFCLLGIGPLETAVFQTPNYHVTQVGNEVSFNCKQTLGHDTMYWYKQDSKKLLKIMFSYNNKQLIVNETVPRRFSPQSSDKAHLNLRIKSVEPEDSAVYLCASSSRDWSAETLYFGSGTRLTVLEDLRNVTPPKVSLFEPSKAEIANKQKATLVCLARGFFPDHVELSWWVNGKEVHSGVSTDPQAYKESNYSYCLSSRLRVSATFWHNPRNHFRCQVQFHGLSEEDKWPEGSPKPVTQNISAEAWGRADCGITSASYHQGVLSATILYEILLGKATLYAVLVSGLVLMAMVKKKNS

SEQ ID NO: 2670 - protein, 306 aa, synthetic construct
MHCRLLSCVAFCLLGIGPLETAVFQTPNYHVTQVGNEVSFNCKQTLGHDTMYWYKQDSKKLLKIMFSYNNKQLIVNETVPRRFSPQSSDKAHLNLRIKSVEPEDSAVYLCASSSRDWSAETLYFGSGTRLTVLEDLRNVTPPKVSLFEPSKAEIANKQKATLVCLARGFFPDHVELSWWVNGKEVHSGVSTDPQAYKESNYSYCLSSRLRVSATFWHNPRNHFRCQVQFHGLSEEDKWPEGSPKPVTQNISAEAWGRADCGITSASYHQGVLSATILYEILLGKATLYAVLVSGLVLMAMVKKKNS

SEQ ID NO: 2671 - protein, 5 aa, synthetic construct
LGHDT

SEQ ID NO: 2672 - protein, 6 aa, synthetic construct
YNNKQL

SEQ ID NO: 2673 - protein, 12 aa, synthetic construct
ASSRDWGPAEQF

SEQ ID NO: 2674 - protein, 111 aa, synthetic construct
AVFQTPNYHVTQVGNEVSFNCKQTLGHDTMYWYKQDSKKLLKIMFSYNNKQLIVNETVPRRFSPQSSDKAHLNLRIKSVEPEDSAVYLCASSRDWGPAEQFFGPGTRLTVL

SEQ ID NO: 2675 - protein, 113 aa, synthetic construct
ETAVFQTPNYHVTQVGNEVSFNCKQTLGHDTMYWYKQDSKKLLKIMFSYNNKQLIVNETVPRRFSPQSSDKAHLNLRIKSVEPEDSAVYLCASSRDWGPAEQFFGPGTRLTVL

SEQ ID NO: 2676 - protein, 132 aa, synthetic construct
  VARIANT 2: note = X can be any Amino Acid
MXCRLLSCVAFCLLGIGPLETAVFQTPNYHVTQVGNEVSFNCKQTLGHDTMYWYKQDSKKLLKIMFSYNNKQLIVNETVPRRFSPQSSDKAHLNLRIKSVEPEDSAVYLCASSRDWGPAEQFFGPGTRLTVL

SEQ ID NO: 2677 - protein, 132 aa, synthetic construct; identical to SEQ ID NO: 2676
  VARIANT 2: note = X can be any Amino Acid

SEQ ID NO: 2678 - protein, 305 aa, synthetic construct
MGCRLLSCVAFCLLGIGPLETAVFQTPNYHVTQVGNEVSFNCKQTLGHDTMYWYKQDSKKLLKIMFSYNNKQLIVNETVPRRFSPQSSDKAHLNLRIKSVEPEDSAVYLCASSRDWGPAEQFFGPGTRLTVLEDLRNVTPPKVSLFEPSKAEIANKQKATLVCLARGFFPDHVELSWWVNGKEVHSGVSTDPQAYKESNYSYCLSSRLRVSATFWHNPRNHFRCQVQFHGLSEEDKWPEGSPKPVTQNISAEAWGRADCGITSASYHQGVLSATILYEILLGKATLYAVLVSGLVLMAMVKKKNS

SEQ ID NO: 2679 - protein, 305 aa, synthetic construct
MACRLLSCVAFCLLGIGPLETAVFQTPNYHVTQVGNEVSFNCKQTLGHDTMYWYKQDSKKLLKIMFSYNNKQLIVNETVPRRFSPQSSDKAHLNLRIKSVEPEDSAVYLCASSRDWGPAEQFFGPGTRLTVLEDLRNVTPPKVSLFEPSKAEIANKQKATLVCLARGFFPDHVELSWWVNGKEVHSGVSTDPQAYKESNYSYCLSSRLRVSATFWHNPRNHFRCQVQFHGLSEEDKWPEGSPKPVTQNISAEAWGRADCGITSASYHQGVLSATILYEILLGKATLYAVLVSGLVLMAMVKKKNS

SEQ ID NO: 2680 - protein, 305 aa, synthetic construct
MHCRLLSCVAFCLLGIGPLETAVFQTPNYHVTQVGNEVSFNCKQTLGHDTMYWYKQDSKKLLKIMFSYNNKQLIVNETVPRRFSPQSSDKAHLNLRIKSVEPEDSAVYLCASSRDWGPAEQFFGPGTRLTVLEDLRNVTPPKVSLFEPSKAEIANKQKATLVCLARGFFPDHVELSWWVNGKEVHSGVSTDPQAYKESNYSYCLSSRLRVSATFWHNPRNHFRCQVQFHGLSEEDKWPEGSPKPVTQNISAEAWGRADCGITSASYHQGVLSATILYEILLGKATLYAVLVSGLVLMAMVKKKNS

SEQ ID NO: 2681 - protein, 5 aa, synthetic construct
NSHNY

SEQ ID NO: 2682 - protein, 6 aa, synthetic construct
SYGAGN

SEQ ID NO: 2683 - protein, 12 aa, synthetic construct
ASASWGGYAEQF

SEQ ID NO: 2684 - protein, 111 aa, synthetic construct
AVTQSPRNKVTVTGGNVTLSCRQTNSHNYMYWYRQDTGHGLRLIHYSYGAGNLQIGDVPDGYKATRTTQEDFFLLLELASPSQTSLYFCASASWGGYAEQFFGPGTRLTVL

SEQ ID NO: 2685 - protein, 113 aa, synthetic construct
EAAVTQSPRNKVTVTGGNVTLSCRQTNSHNYMYWYRQDTGHGLRLIHYSYGAGNLQIGDVPDGYKATRTTQEDFFLLLELASPSQTSLYFCASASWGGYAEQFFGPGTRLTVL

SEQ ID NO: 2686 - protein, 130 aa, synthetic construct
  VARIANT 2: note = X can be any Amino Acid
MXSRLFLVLSLLCTKHMEAAVTQSPRNKVTVTGGNVTLSCRQTNSHNYMYWYRQDTGHGLRLIHYSYGAGNLQIGDVPDGYKATRTTQEDFFLLLELASPSQTSLYFCASASWGGYAEQFFGPGTRLTVL

SEQ ID NO: 2687 - protein, 130 aa, synthetic construct; identical to SEQ ID NO: 2686
  VARIANT 2: note = X can be any Amino Acid

SEQ ID NO: 2688 - protein, 303 aa, synthetic construct
MGSRLFLVLSLLCTKHMEAAVTQSPRNKVTVTGGNVTLSCRQTNSHNYMYWYRQDTGHGLRLIHYSYGAGNLQIGDVPDGYKATRTTQEDFFLLLELASPSQTSLYFCASASWGGYAEQFFGPGTRLTVLEDLRNVTPPKVSLFEPSKAEIANKQKATLVCLARGFFPDHVELSWWVNGKEVHSGVSTDPQAYKESNYSYCLSSRLRVSATFWHNPRNHFRCQVQFHGLSEEDKWPEGSPKPVTQNISAEAWGRADCGITSASYHQGVLSATILYEILLGKATLYAVLVSGLVLMAMVKKKNS

SEQ ID NO: 2689 - protein, 303 aa, synthetic construct
MASRLFLVLSLLCTKHMEAAVTQSPRNKVTVTGGNVTLSCRQTNSHNYMYWYRQDTGHGLRLIHYSYGAGNLQIGDVPDGYKATRTTQEDFFLLLELASPSQTSLYFCASASWGGYAEQFFGPGTRLTVLEDLRNVTPPKVSLFEPSKAEIANKQKATLVCLARGFFPDHVELSWWVNGKEVHSGVSTDPQAYKESNYSYCLSSRLRVSATFWHNPRNHFRCQVQFHGLSEEDKWPEGSPKPVTQNISAEAWGRADCGITSASYHQGVLSATILYEILLGKATLYAVLVSGLVLMAMVKKKNS

SEQ ID NO: 2690 - protein, 303 aa, synthetic construct
MHSRLFLVLSLLCTKHMEAAVTQSPRNKVTVTGGNVTLSCRQTNSHNYMYWYRQDTGHGLRLIHYSYGAGNLQIGDVPDGYKATRTTQEDFFLLLELASPSQTSLYFCASASWGGYAEQFFGPGTRLTVLEDLRNVTPPKVSLFEPSKAEIANKQKATLVCLARGFFPDHVELSWWVNGKEVHSGVSTDPQAYKESNYSYCLSSRLRVSATFWHNPRNHFRCQVQFHGLSEEDKWPEGSPKPVTQNISAEAWGRADCGITSASYHQGVLSATILYEILLGKATLYAVLVSGLVLMAMVKKKNS

SEQ ID NO: 2691 - protein, 5 aa, synthetic construct
SGHLS

SEQ ID NO: 2692 - protein, 6 aa, synthetic construct
HYDKME

SEQ ID NO: 2693 - protein, 13 aa, synthetic construct
ASSLTDPLDSDYT

SEQ ID NO: 2694 - protein, 114 aa, synthetic construct
NSGVVQSPRYIIKGKGERSILKCIPISGHLSVAWYQQTQGQELKFFIQHYDKMERDKGNLPSRFSVQQFDDYHSEMNMSALELEDSAVYFCASSLTDPLDSDYTFGSGTRLLVI

SEQ ID NO: 2695 - protein, 113 aa, synthetic construct
SGVVQSPRYIIKGKGERSILKCIPISGHLSVAWYQQTQGQELKFFIQHYDKMERDKGNLPSRFSVQQFDDYHSEMNMSALELEDSAVYFCASSLTDPLDSDYTFGSGTRLLVI

SEQ ID NO: 2696 - protein, 143 aa, synthetic construct
  VARIANT 2: note = X can be any Amino Acid
MXNTAFPDPAWNTTLLSWVALFLLGTSSANSGVVQSPRYIIKGKGERSILKCIPISGHLSVAWYQQTQGQELKFFIQHYDKMERDKGNLPSRFSVQQFDDYHSEMNMSALELEDSAVYFCASSLTDPLDSDYTFGSGTRLLVI

SEQ ID NO: 2697 - protein, 143 aa, synthetic construct; identical to SEQ ID NO: 2696
  VARIANT 2: note = X can be any Amino Acid

SEQ ID NO: 2698 - protein, 316 aa, synthetic construct
MSNTAFPDPAWNTTLLSWVALFLLGTSSANSGVVQSPRYIIKGKGERSILKCIPISGHLSVAWYQQTQGQELKFFIQHYDKMERDKGNLPSRFSVQQFDDYHSEMNMSALELEDSAVYFCASSLTDPLDSDYTFGSGTRLLVIEDLRNVTPPKVSLFEPSKAEIANKQKATLVCLARGFFPDHVELSWWVNGKEVHSGVSTDPQAYKESNYSYCLSSRLRVSATFWHNPRNHFRCQVQFHGLSEEDKWPEGSPKPVTQNISAEAWGRADCGITSASYQQGVLSATILYEILLGKATLYAVLVSTLVVMAMVKRKNS

SEQ ID NO: 2699 - protein, 316 aa, synthetic construct
MANTAFPDPAWNTTLLSWVALFLLGTSSANSGVVQSPRYIIKGKGERSILKCIPISGHLSVAWYQQTQGQELKFFIQHYDKMERDKGNLPSRFSVQQFDDYHSEMNMSALELEDSAVYFCASSLTDPLDSDYTFGSGTRLLVIEDLRNVTPPKVSLFEPSKAEIANKQKATLVCLARGFFPDHVELSWWVNGKEVHSGVSTDPQAYKESNYSYCLSSRLRVSATFWHNPRNHFRCQVQFHGLSEEDKWPEGSPKPVTQNISAEAWGRADCGITSASYQQGVLSATILYEILLGKATLYAVLVSTLVVMAMVKRKNS

SEQ ID NO: 2700 - protein, 316 aa, synthetic construct
MHNTAFPDPAWNTTLLSWVALFLLGTSSANSGVVQSPRYIIKGKGERSILKCIPISGHLSVAWYQQTQGQELKFFIQHYDKMERDKGNLPSRFSVQQFDDYHSEMNMSALELEDSAVYFCASSLTDPLDSDYTFGSGTRLLVIEDLRNVTPPKVSLFEPSKAEIANKQKATLVCLARGFFPDHVELSWWVNGKEVHSGVSTDPQAYKESNYSYCLSSRLRVSATFWHNPRNHFRCQVQFHGLSEEDKWPEGSPKPVTQNISAEAWGRADCGITSASYQQGVLSATILYEILLGKATLYAVLVSTLVVMAMVKRKNS

SEQ ID NO: 2701 - protein, 5 aa, synthetic construct
SGHLS

SEQ ID NO: 2702 - protein, 6 aa, synthetic construct
HYDKME

SEQ ID NO: 2703 - protein, 15 aa, synthetic construct
CASSLTDPLDSDYTF

SEQ ID NO: 2704 - protein, 114 aa, synthetic construct; identical to SEQ ID NO: 2694

SEQ ID NO: 2705 - protein, 113 aa, synthetic construct; identical to SEQ ID NO: 2695

SEQ ID NO: 2706 - protein, 143 aa, synthetic construct; identical to SEQ ID NO: 2696
  VARIANT 2: note = X can be any Amino Acid

SEQ ID NO: 2707 - protein, 143 aa, synthetic construct; identical to SEQ ID NO: 2696
  VARIANT 2: note = X can be any Amino Acid

SEQ ID NO: 2708 - protein, 316 aa, synthetic construct; identical to SEQ ID NO: 2698

SEQ ID NO: 2709 - protein, 316 aa, synthetic construct; identical to SEQ ID NO: 2699

SEQ ID NO: 2710 - protein, 316 aa, synthetic construct; identical to SEQ ID NO: 2699

SEQ ID NO: 2711 - protein, 6 aa, synthetic construct
DFQATT

SEQ ID NO: 2712 - protein, 7 aa, synthetic construct
SNEGSKA

SEQ ID NO: 2713 - protein, 12 aa, synthetic construct
SASNRLAVNEQF

SEQ ID NO: 2714 - protein, 120 aa, synthetic construct
GSGLGAVVSQHPSWVICKSGTSVKIECRSLDFQATTMFWYRQFPKQSLMLMATSNEGSKATYEQGVEKDKFLINHASLTLSTLTVTSAHPEDSSFYICSASNRLAVNEQFFGPGTRLTVL

SEQ ID NO: 2715 - protein, 116 aa, synthetic construct
GAVVSQHPSWVICKSGTSVKIECRSLDFQATTMFWYRQFPKQSLMLMATSNEGSKATYEQGVEKDKFLINHASLTLSTLTVTSAHPEDSSFYICSASNRLAVNEQFFGPGTRLTVL

SEQ ID NO: 2716 - protein, 141 aa, synthetic construct
  VARIANT 2: note = X can be any Amino Acid
MXLLLLLLGPGISLLLPGSLAGSGLGAVVSQHPSWVICKSGTSVKIECRSLDFQATTMFWYRQFPKQSLMLMATSNEGSKATYEQGVEKDKFLINHASLTLSTLTVTSAHPEDSSFYICSASNRLAVNEQFFGPGTRLTVL

SEQ ID NO: 2717 - protein, 141 aa, synthetic construct; identical to SEQ ID NO: 2716
  VARIANT 2: note = X can be any Amino Acid

SEQ ID NO: 2718 - protein, 314 aa, synthetic construct
MLLLLLLLGPGISLLLPGSLAGSGLGAVVSQHPSWVICKSGTSVKIECRSLDFQATTMFWYRQFPKQSLMLMATSNEGSKATYEQGVEKDKFLINHASLTLSTLTVTSAHPEDSSFYICSASNRLAVNEQFFGPGTRLTVLEDLRNVTPPKVSLFEPSKAEIANKQKATLVCLARGFFPDHVELSWWVNGKEVHSGVCTDPQAYKESNYSYCLSSRLRVSATFWHNPRNHFRCQVQFHGLSEEDKWPEGSPKPVTQNISAEAWGRADCGITSASYQQGVLSATILYEILLGKATLYAVLVSTLVVMAMVKRKNS

SEQ ID NO: 2719 - protein, 314 aa, synthetic construct
MALLLLLLGPGISLLLPGSLAGSGLGAVVSQHPSWVICKSGTSVKIECRSLDFQATTMFWYRQFPKQSLMLMATSNEGSKATYEQGVEKDKFLINHASLTLSTLTVTSAHPEDSSFYICSASNRLAVNEQFFGPGTRLTVLEDLRNVTPPKVSLFEPSKAEIANKQKATLVCLARGFFPDHVELSWWVNGKEVHSGVCTDPQAYKESNYSYCLSSRLRVSATFWHNPRNHFRCQVQFHGLSEEDKWPEGSPKPVTQNISAEAWGRADCGITSASYQQGVLSATILYEILLGKATLYAVLVSTLVVMAMVKRKNS

SEQ ID NO: 2720 - protein, 314 aa, synthetic construct
MHLLLLLLGPGISLLLPGSLAGSGLGAVVSQHPSWVICKSGTSVKIECRSLDFQATTMFWYRQFPKQSLMLMATSNEGSKATYEQGVEKDKFLINHASLTLSTLTVTSAHPEDSSFYICSASNRLAVNEQFFGPGTRLTVLEDLRNVTPPKVSLFEPSKAEIANKQKATLVCLARGFFPDHVELSWWVNGKEVHSGVCTDPQAYKESNYSYCLSSRLRVSATFWHNPRNHFRCQVQFHGLSEEDKWPEGSPKPVTQNISAEAWGRADCGITSASYQQGVLSATILYEILLGKATLYAVLVSTLVVMAMVKRKNS

SEQ ID NO: 2721 - protein, 5 aa, synthetic construct
LNHDA

SEQ ID NO: 2722 - protein, 6 aa, synthetic construct
SQIVND

SEQ ID NO: 2723 - protein, 14 aa, synthetic construct
ASSNQLVTGGYGYT

SEQ ID NO: 2724 - protein, 113 aa, synthetic construct
GITQSPKYLFRKEGQNVTLSCEQNLNHDAMYWYRQDPGQGLRLIYYSQIVNDFQKGDIAEGYSVSREKKESFPLTVTSAQKNPTAFYLCASSNQLVTGGYGYTFGSGTRLTVV

SEQ ID NO: 2725 - protein, 115 aa, synthetic construct
DGGITQSPKYLFRKEGQNVTLSCEQNLNHDAMYWYRQDPGQGLRLIYYSQIVNDFQKGDIAEGYSVSREKKESFPLTVTSAQKNPTAFYLCASSNQLVTGGYGYTFGSGTRLTVV

SEQ ID NO: 2726 - protein, 134 aa, synthetic construct
  VARIANT 2: note = X can be any Amino Acid
MXNQVLCCVVLCFLGANTVDGGITQSPKYLFRKEGQNVTLSCEQNLNHDAMYWYRQDPGQGLRLIYYSQIVNDFQKGDIAEGYSVSREKKESFPLTVTSAQKNPTAFYLCASSNQLVTGGYGYTFGSGTRLTVV

SEQ ID NO: 2727 - protein, 134 aa, synthetic construct; identical to SEQ ID NO: 2726
  VARIANT 2: note = X can be any Amino Acid

SEQ ID NO: 2728 - protein, 307 aa, synthetic construct
MSNQVLCCVVLCFLGANTVDGGITQSPKYLFRKEGQNVTLSCEQNLNHDAMYWYRQDPGQGLRLIYYSQIVNDFQKGDIAEGYSVSREKKESFPLTVTSAQKNPTAFYLCASSNQLVTGGYGYTFGSGTRLTVVEDLRNVTPPKVSLFEPSKAEIANKQKATLVCLARGFFPDHVELSWWVNGKEVHSGVCTDPQAYKESNYSYCLSSRLRVSATFWHNPRNHFRCQVQFHGLSEEDKWPEGSPKPVTQNISAEAWGRADCGITSASYQQGVLSATILYEILLGKATLYAVLVSTLVVMAMVKRKNS

SEQ ID NO: 2729 - protein, 307 aa, synthetic construct
MANQVLCCVVLCFLGANTVDGGITQSPKYLFRKEGQNVTLSCEQNLNHDAMYWYRQDPGQGLRLIYYSQIVNDFQKGDIAEGYSVSREKKESFPLTVTSAQKNPTAFYLCASSNQLVTGGYGYTFGSGTRLTVVEDLRNVTPPKVSLFEPSKAEIANKQKATLVCLARGFFPDHVELSWWVNGKEVHSGVCTDPQAYKESNYSYCLSSRLRVSATFWHNPRNHFRCQVQFHGLSEEDKWPEGSPKPVTQNISAEAWGRADCGITSASYQQGVLSATILYEILLGKATLYAVLVSTLVVMAMVKRKNS

SEQ ID NO: 2730 - protein, 307 aa, synthetic construct
MHNQVLCCVVLCFLGANTVDGGITQSPKYLFRKEGQNVTLSCEQNLNHDAMYWYRQDPGQGLRLIYYSQIVNDFQKGDIAEGYSVSREKKESFPLTVTSAQKNPTAFYLCASSNQLVTGGYGYTFGSGTRLTVVEDLRNVTPPKVSLFEPSKAEIANKQKATLVCLARGFFPDHVELSWWVNGKEVHSGVCTDPQAYKESNYSYCLSSRLRVSATFWHNPRNHFRCQVQFHGLSEEDKWPEGSPKPVTQNISAEAWGRADCGITSASYQQGVLSATILYEILLGKATLYAVLVSTLVVMAMVKRKNS

SEQ ID NO: 2731 - protein, 6 aa, synthetic construct
NSQYPW

SEQ ID NO: 2732 - protein, 6 aa, synthetic construct
LRSPGD

SEQ ID NO: 2733 - protein, 12 aa, synthetic construct
TCSARHSAETLY

SEQ ID NO: 2734 - protein, 116 aa, synthetic construct
DPTVTLLEQNPRWRLVPRGQAVNLRCILKNSQYPWMSWYQQDLQKQLQWLFTLRSPGDKEVKSLPGADYLATRVTDTELRLQVANMSQGRTLYCTCSARHSAETLYFGSGTRLTVL

SEQ ID NO: 2735 - protein, 113 aa, synthetic construct
VTLLEQNPRWRLVPRGQAVNLRCILKNSQYPWMSWYQQDLQKQLQWLFTLRSPGDKEVKSLPGADYLATRVTDTELRLQVANMSQGRTLYCTCSARHSAETLYFGSGTRLTVL

SEQ ID NO: 2736 - protein, 134 aa, synthetic construct
  VARIANT 2: note = X can be any Amino Acid
MXQFCILCLCVLMASVATDPTVTLLEQNPRWRLVPRGQAVNLRCILKNSQYPWMSWYQQDLQKQLQWLFTLRSPGDKEVKSLPGADYLATRVTDTELRLQVANMSQGRTLYCTCSARHSAETLYFGSGTRLTVL

SEQ ID NO: 2737 - protein, 134 aa, synthetic construct; identical to SEQ ID NO: 2736
  VARIANT 2: note = X can be any Amino Acid

SEQ ID NO: 2738 - protein, 307 aa, synthetic construct
MWQFCILCLCVLMASVATDPTVTLLEQNPRWRLVPRGQAVNLRCILKNSQYPWMSWYQQDLQKQLQWLFTLRSPGDKEVKSLPGADYLATRVTDTELRLQVANMSQGRTLYCTCSARHSAETLYFGSGTRLTVLEDLRNVTPPKVSLFEPSKAEIANKQKATLVCLARGFFPDHVELSWWVNGKEVHSGVCTDPQAYKESNYSYCLSSRLRVSATFWHNPRNHFRCQVQFHGLSEEDKWPEGSPKPVTQNISAEAWGRADCGITSASYQQGVLSATILYEILLGKATLYAVLVSTLVVMAMVKRKNS

SEQ ID NO: 2739 - protein, 307 aa, synthetic construct
MAQFCILCLCVLMASVATDPTVTLLEQNPRWRLVPRGQAVNLRCILKNSQYPWMSWYQQDLQKQLQWLFTLRSPGDKEVKSLPGADYLATRVTDTELRLQVANMSQGRTLYCTCSARHSAETLYFGSGTRLTVLEDLRNVTPPKVSLFEPSKAEIANKQKATLVCLARGFFPDHVELSWWVNGKEVHSGVCTDPQAYKESNYSYCLSSRLRVSATFWHNPRNHFRCQVQFHGLSEEDKWPEGSPKPVTQNISAEAWGRADCGITSASYQQGVLSATILYEILLGKATLYAVLVSTLVVMAMVKRKNS

SEQ ID NO: 2740 - protein, 307 aa, synthetic construct
MHQFCILCLCVLMASVATDPTVTLLEQNPRWRLVPRGQAVNLRCILKNSQYPWMSWYQQDLQKQLQWLFTLRSPGDKEVKSLPGADYLATRVTDTELRLQVANMSQGRTLYCTCSARHSAETLYFGSGTRLTVLEDLRNVTPPKVSLFEPSKAEIANKQKATLVCLARGFFPDHVELSWWVNGKEVHSGVCTDPQAYKESNYSYCLSSRLRVSATFWHNPRNHFRCQVQFHGLSEEDKWPEGSPKPVTQNISAEAWGRADCGITSASYQQGVLSATILYEILLGKATLYAVLVSTLVVMAMVKRKNS

SEQ ID NO: 2741 - protein, 5 aa, synthetic construct
SGHRS

SEQ ID NO: 2742 - protein, 6 aa, synthetic construct
YFSETQ

SEQ ID NO: 2743 - protein, 13 aa, synthetic construct
ASSLTSGGFDEQF

SEQ ID NO: 2744 - protein, 112 aa, synthetic construct
GVTQTPRYLIKTRGQQVTLSCSPISGHRSVSWYQQTPGQGLQFLFEYFSETQRNKGNFPGRFSGRQFSNSRSEMNVSTLELGDSALYLCASSLTSGGFDEQFFGPGTRLTVL

SEQ ID NO: 2745 - protein, 114 aa, synthetic construct
KAGVTQTPRYLIKTRGQQVTLSCSPISGHRSVSWYQQTPGQGLQFLFEYFSETQRNKGNFPGRFSGRQFSNSRSEMNVSTLELGDSALYLCASSLTSGGFDEQFFGPGTRLTVL

SEQ ID NO: 2746 - protein, 133 aa, synthetic construct
  VARIANT 2: note = X can be any Amino Acid
MXSRLLCWVLLCLLGAGPVKAGVTQTPRYLIKTRGQQVTLSCSPISGHRSVSWYQQTPGQGLQFLFEYFSETQRNKGNFPGRFSGRQFSNSRSEMNVSTLELGDSALYLCASSLTSGGFDEQFFGPGTRLTVL

SEQ ID NO: 2747 - protein, 133 aa, synthetic construct; identical to SEQ ID NO: 2746
  VARIANT 2: note = X can be any Amino Acid

SEQ ID NO: 2748 - protein, 306 aa, synthetic construct
MGSRLLCWVLLCLLGAGPVKAGVTQTPRYLIKTRGQQVTLSCSPISGHRSVSWYQQTPGQGLQFLFEYFSETQRNKGNFPGRFSGRQFSNSRSEMNVSTLELGDSALYLCASSLTSGGFDEQFFGPGTRLTVLEDLRNVTPPKVSLFEPSKAEIANKQKATLVCLARGFFPDHVELSWWVNGKEVHSGVCTDPQAYKESNYSYCLSSRLRVSATFWHNPRNHFRCQVQFHGLSEEDKWPEGSPKPVTQNISAEAWGRADCGITSASYQQGVLSATILYEILLGKATLYAVLVSTLVVMAMVKRKNS

SEQ ID NO: 2749 - protein, 306 aa, synthetic construct
MASRLLCWVLLCLLGAGPVKAGVTQTPRYLIKTRGQQVTLSCSPISGHRSVSWYQQTPGQGLQFLFEYFSETQRNKGNFPGRFSGRQFSNSRSEMNVSTLELGDSALYLCASSLTSGGFDEQFFGPGTRLTVLEDLRNVTPPKVSLFEPSKAEIANKQKATLVCLARGFFPDHVELSWWVNGKEVHSGVCTDPQAYKESNYSYCLSSRLRVSATFWHNPRNHFRCQVQFHGLSEEDKWPEGSPKPVTQNISAEAWGRADCGITSASYQQGVLSATILYEILLGKATLYAVLVSTLVVMAMVKRKNS

SEQ ID NO: 2750 - protein, 306 aa, synthetic construct
MHSRLLCWVLLCLLGAGPVKAGVTQTPRYLIKTRGQQVTLSCSPISGHRSVSWYQQTPGQGLQFLFEYFSETQRNKGNFPGRFSGRQFSNSRSEMNVSTLELGDSALYLCASSLTSGGFDEQFFGPGTRLTVLEDLRNVTPPKVSLFEPSKAEIANKQKATLVCLARGFFPDHVELSWWVNGKEVHSGVCTDPQAYKESNYSYCLSSRLRVSATFWHNPRNHFRCQVQFHGLSEEDKWPEGSPKPVTQNISAEAWGRADCGITSASYQQGVLSATILYEILLGKATLYAVLVSTLVVMAMVKRKNS

SEQ ID NO: 2751 - protein, 6 aa, synthetic construct
DFQATT

SEQ ID NO: 2752 - protein, 7 aa, synthetic construct
SNEGSKA

SEQ ID NO: 2753 - protein, 13 aa, synthetic construct
SAREGAGGMGTQY

SEQ ID NO: 2754 - protein, 116 aa, synthetic construct
AVVSQHPSRVICKSGTSVKIECRSLDFQATTMFWYRQFPKQSLMLMATSNEGSKATYEQGVEKDKFLINHASLTLSTLTVTSAHPEDSSFYICSAREGAGGMGTQYFGPGTRLLVL

SEQ ID NO: 2755 - protein, 117 aa, synthetic construct
GAVVSQHPSRVICKSGTSVKIECRSLDFQATTMFWYRQFPKQSLMLMATSNEGSKATYEQGVEKDKFLINHASLTLSTLTVTSAHPEDSSFYICSAREGAGGMGTQYFGPGTRLLVL

SEQ ID NO: 2756 - protein, 132 aa, synthetic construct
  VARIANT 2: note = X can be any Amino Acid
MXLLLLLLGPAGSGLGAVVSQHPSRVICKSGTSVKIECRSLDFQATTMFWYRQFPKQSLMLMATSNEGSKATYEQGVEKDKFLINHASLTLSTLTVTSAHPEDSSFYICSAREGAGGMGTQYFGPGTRLLVL

SEQ ID NO: 2757 - protein, 132 aa, synthetic construct; identical to SEQ ID NO: 2756
  VARIANT 2: note = X can be any Amino Acid

SEQ ID NO: 2758 - protein, 305 aa, synthetic construct
MLLLLLLLGPAGSGLGAVVSQHPSRVICKSGTSVKIECRSLDFQATTMFWYRQFPKQSLMLMATSNEGSKATYEQGVEKDKFLINHASLTLSTLTVTSAHPEDSSFYICSAREGAGGMGTQYFGPGTRLLVLEDLRNVTPPKVSLFEPSKAEIANKQKATLVCLARGFFPDHVELSWWVNGKEVHSGVCTDPQAYKESNYSYCLSSRLRVSATFWHNPRNHFRCQVQFHGLSEEDKWPEGSPKPVTQNISAEAWGRADCGITSASYQQGVLSATILYEILLGKATLYAVLVSTLVVMAMVKRKNS

SEQ ID NO: 2759 - protein, 305 aa, synthetic construct
MALLLLLLGPAGSGLGAVVSQHPSRVICKSGTSVKIECRSLDFQATTMFWYRQFPKQSLMLMATSNEGSKATYEQGVEKDKFLINHASLTLSTLTVTSAHPEDSSFYICSAREGAGGMGTQYFGPGTRLLVLEDLRNVTPPKVSLFEPSKAEIANKQKATLVCLARGFFPDHVELSWWVNGKEVHSGVCTDPQAYKESNYSYCLSSRLRVSATFWHNPRNHFRCQVQFHGLSEEDKWPEGSPKPVTQNISAEAWGRADCGITSASYQQGVLSATILYEILLGKATLYAVLVSTLVVMAMVKRKNS

SEQ ID NO: 2760 - protein, 305 aa, synthetic construct
MHLLLLLLGPAGSGLGAVVSQHPSRVICKSGTSVKIECRSLDFQATTMFWYRQFPKQSLMLMATSNEGSKATYEQGVEKDKFLINHASLTLSTLTVTSAHPEDSSFYICSAREGAGGMGTQYFGPGTRLLVLEDLRNVTPPKVSLFEPSKAEIANKQKATLVCLARGFFPDHVELSWWVNGKEVHSGVCTDPQAYKESNYSYCLSSRLRVSATFWHNPRNHFRCQVQFHGLSEEDKWPEGSPKPVTQNISAEAWGRADCGITSASYQQGVLSATILYEILLGKATLYAVLVSTLVVMAMVKRKNS

SEQ ID NO: 2761 - protein, 6 aa, synthetic construct
GTSNPN

SEQ ID NO: 2762 - protein, 5 aa, synthetic construct
SVGIG

SEQ ID NO: 2763 - protein, 12 aa, synthetic construct
AYSPGLASDTQY

SEQ ID NO: 2764 - protein, 112 aa, synthetic construct
QTIHQWPATLVQPVGSPLSLECTVEGTSNPNLYWYRQAAGRGLQLLFYSVGIGQISSEVPQNLSASRPQDRQFILSSKKLLLSDSGFYLCAYSPGLASDTQYFGPGTRLTVL

SEQ ID NO: 2765 - protein, 113 aa, synthetic construct
SQTIHQWPATLVQPVGSPLSLECTVEGTSNPNLYWYRQAAGRGLQLLFYSVGIGQISSEVPQNLSASRPQDRQFILSSKKLLLSDSGFYLCAYSPGLASDTQYFGPGTRLTVL

SEQ ID NO: 2766 - protein, 130 aa, synthetic construct
  VARIANT 2: note = X can be any Amino Acid
MXCSLLALLLGTFFGVRSQTIHQWPATLVQPVGSPLSLECTVEGTSNPNLYWYRQAAGRGLQLLFYSVGIGQISSEVPQNLSASRPQDRQFILSSKKLLLSDSGFYLCAYSPGLASDTQYFGPGTRLTVL

SEQ ID NO: 2767 - protein, 130 aa, synthetic construct; identical to SEQ ID NO: 2766
  VARIANT 2: note = X can be any Amino Acid

SEQ ID NO: 2768 - protein, 303 aa, synthetic construct
MLCSLLALLLGTFFGVRSQTIHQWPATLVQPVGSPLSLECTVEGTSNPNLYWYRQAAGRGLQLLFYSVGIGQISSEVPQNLSASRPQDRQFILSSKKLLLSDSGFYLCAYSPGLASDTQYFGPGTRLTVLEDLRNVTPPKVSLFEPSKAEIANKQKATLVCLARGFFPDHVELSWWVNGKEVHSGVCTDPQAYKESNYSYCLSSRLRVSATFWHNPRNHFRCQVQFHGLSEEDKWPEGSPKPVTQNISAEAWGRADCGITSASYQQGVLSATILYEILLGKATLYAVLVSTLVVMAMVKRKNS

SEQ ID NO: 2769 - protein, 303 aa, synthetic construct
MACSLLALLLGTFFGVRSQTIHQWPATLVQPVGSPLSLECTVEGTSNPNLYWYRQAAGRGLQLLFYSVGIGQISSEVPQNLSASRPQDRQFILSSKKLLLSDSGFYLCAYSPGLASDTQYFGPGTRLTVLEDLRNVTPPKVSLFEPSKAEIANKQKATLVCLARGFFPDHVELSWWVNGKEVHSGVCTDPQAYKESNYSYCLSSRLRVSATFWHNPRNHFRCQVQFHGLSEEDKWPEGSPKPVTQNISAEAWGRADCGITSASYQQGVLSATILYEILLGKATLYAVLVSTLVVMAMVKRKNS

SEQ ID NO: 2770 - protein, 303 aa, synthetic construct
MHCSLLALLLGTFFGVRSQTIHQWPATLVQPVGSPLSLECTVEGTSNPNLYWYRQAAGRGLQLLFYSVGIGQISSEVPQNLSASRPQDRQFILSSKKLLLSDSGFYLCAYSPGLASDTQYFGPGTRLTVLEDLRNVTPPKVSLFEPSKAEIANKQKATLVCLARGFFPDHVELSWWVNGKEVHSGVCTDPQAYKESNYSYCLSSRLRVSATFWHNPRNHFRCQVQFHGLSEEDKWPEGSPKPVTQNISAEAWGRADCGITSASYQQGVLSATILYEILLGKATLYAVLVSTLVVMAMVKRKNS

SEQ ID NO: 2771 - protein, 5 aa, synthetic construct
SGHRS

SEQ ID NO: 2772 - protein, 6 aa, synthetic construct
YFSETQ

SEQ ID NO: 2773 - protein, 14 aa, synthetic construct
ASSLAAGGYFNEQF

SEQ ID NO: 2774 - protein, 113 aa, synthetic construct
GVTQTPRYLIKTRGQQVTLSCSPISGHRSVSWYQQTPGQGLQFLFEYFSETQRNKGNFPGRFSGRQFSNSRSEMNVSTLELGDSALYLCASSLAAGGYFNEQFFGPGTRLTVL

SEQ ID NO: 2775 - protein, 115 aa, synthetic construct
KAGVTQTPRYLIKTRGQQVTLSCSPISGHRSVSWYQQTPGQGLQFLFEYFSETQRNKGNFPGRFSGRQFSNSRSEMNVSTLELGDSALYLCASSLAAGGYFNEQFFGPGTRLTVL

SEQ ID NO: 2776 - protein, 134 aa, synthetic construct
  VARIANT 2: note = X can be any Amino Acid
MXSRLLCWVLLCLLGAGPVKAGVTQTPRYLIKTRGQQVTLSCSPISGHRSVSWYQQTPGQGLQFLFEYFSETQRNKGNFPGRFSGRQFSNSRSEMNVSTLELGDSALYLCASSLAAGGYFNEQFFGPGTRLTVL

SEQ ID NO: 2777 - protein, 134 aa, synthetic construct; identical to SEQ ID NO: 2776
  VARIANT 2: note = X can be any Amino Acid

SEQ ID NO: 2778 - protein, 307 aa, synthetic construct
MGSRLLCWVLLCLLGAGPVKAGVTQTPRYLIKTRGQQVTLSCSPISGHRSVSWYQQTPGQGLQFLFEYFSETQRNKGNFPGRFSGRQFSNSRSEMNVSTLELGDSALYLCASSLAAGGYFNEQFFGPGTRLTVLEDLRNVTPPKVSLFEPSKAEIANKQKATLVCLARGFFPDHVELSWWVNGKEVHSGVCTDPQAYKESNYSYCLSSRLRVSATFWHNPRNHFRCQVQFHGLSEEDKWPEGSPKPVTQNISAEAWGRADCGITSASYQQGVLSATILYEILLGKATLYAVLVSTLVVMAMVKRKNS

SEQ ID NO: 2779 - protein, 307 aa, synthetic construct
MASRLLCWVLLCLLGAGPVKAGVTQTPRYLIKTRGQQVTLSCSPISGHRSVSWYQQTPGQGLQFLFEYFSETQRNKGNFPGRFSGRQFSNSRSEMNVSTLELGDSALYLCASSLAAGGYFNEQFFGPGTRLTVLEDLRNVTPPKVSLFEPSKAEIANKQKATLVCLARGFFPDHVELSWWVNGKEVHSGVCTDPQAYKESNYSYCLSSRLRVSATFWHNPRNHFRCQVQFHGLSEEDKWPEGSPKPVTQNISAEAWGRADCGITSASYQQGVLSATILYEILLGKATLYAVLVSTLVVMAMVKRKNS

SEQ ID NO: 2780 - protein, 307 aa, synthetic construct
MHSRLLCWVLLCLLGAGPVKAGVTQTPRYLIKTRGQQVTLSCSPISGHRSVSWYQQTPGQGLQFLFEYFSETQRNKGNFPGRFSGRQFSNSRSEMNVSTLELGDSALYLCASSLAAGGYFNEQFFGPGTRLTVLEDLRNVTPPKVSLFEPSKAEIANKQKATLVCLARGFFPDHVELSWWVNGKEVHSGVCTDPQAYKESNYSYCLSSRLRVSATFWHNPRNHFRCQVQFHGLSEEDKWPEGSPKPVTQNISAEAWGRADCGITSASYQQGVLSATILYEILLGKATLYAVLVSTLVVMAMVKRKNS

SEQ ID NO: 2781 - protein, 6 aa, synthetic construct
DFQATT

SEQ ID NO: 2782 - protein, 7 aa, synthetic construct
SNEGSKA

SEQ ID NO: 2783 - protein, 11 aa, synthetic construct
SAGRASTDTQY

SEQ ID NO: 2784 - protein, 119 aa, synthetic construct
GSGLGAVVSQHPSWVICKSGTSVKIECRSLDFQATTMFWYRQFPKQSLMLMATSNEGSKATYEQGVEKDKFLINHASLTLSTLTVTSAHPEDSSFYICSAGRASTDTQYFGPGTRLTVL

SEQ ID NO: 2785 - protein, 115 aa, synthetic construct
GAVVSQHPSWVICKSGTSVKIECRSLDFQATTMFWYRQFPKQSLMLMATSNEGSKATYEQGVEKDKFLINHASLTLSTLTVTSAHPEDSSFYICSAGRASTDTQYFGPGTRLTVL

SEQ ID NO: 2786 - protein, 140 aa, synthetic construct
  VARIANT 2: note = X can be any Amino Acid
MXLLLLLLGPGISLLLPGSLAGSGLGAVVSQHPSWVICKSGTSVKIECRSLDFQATTMFWYRQFPKQSLMLMATSNEGSKATYEQGVEKDKFLINHASLTLSTLTVTSAHPEDSSFYICSAGRASTDTQYFGPGTRLTVL

SEQ ID NO: 2787 - protein, 140 aa, synthetic construct; identical to SEQ ID NO: 2786
  VARIANT 2: note = X can be any Amino Acid

SEQ ID NO: 2788 - protein, 313 aa, synthetic construct
MLLLLLLLGPGISLLLPGSLAGSGLGAVVSQHPSWVICKSGTSVKIECRSLDFQATTMFWYRQFPKQSLMLMATSNEGSKATYEQGVEKDKFLINHASLTLSTLTVTSAHPEDSSFYICSAGRASTDTQYFGPGTRLTVLEDLRNVTPPKVSLFEPSKAEIANKQKATLVCLARGFFPDHVELSWWVNGKEVHSGVCTDPQAYKESNYSYCLSSRLRVSATFWHNPRNHFRCQVQFHGLSEEDKWPEGSPKPVTQNISAEAWGRADCGITSASYQQGVLSATILYEILLGKATLYAVLVSTLVVMAMVKRKNS

SEQ ID NO: 2789 - protein, 313 aa, synthetic construct
MALLLLLLGPGISLLLPGSLAGSGLGAVVSQHPSWVICKSGTSVKIECRSLDFQATTMFWYRQFPKQSLMLMATSNEGSKATYEQGVEKDKFLINHASLTLSTLTVTSAHPEDSSFYICSAGRASTDTQYFGPGTRLTVLEDLRNVTPPKVSLFEPSKAEIANKQKATLVCLARGFFPDHVELSWWVNGKEVHSGVCTDPQAYKESNYSYCLSSRLRVSATFWHNPRNHFRCQVQFHGLSEEDKWPEGSPKPVTQNISAEAWGRADCGITSASYQQGVLSATILYEILLGKATLYAVLVSTLVVMAMVKRKNS

SEQ ID NO: 2790 - protein, 313 aa, synthetic construct
MHLLLLLLGPGISLLLPGSLAGSGLGAVVSQHPSWVICKSGTSVKIECRSLDFQATTMFWYRQFPKQSLMLMATSNEGSKATYEQGVEKDKFLINHASLTLSTLTVTSAHPEDSSFYICSAGRASTDTQYFGPGTRLTVLEDLRNVTPPKVSLFEPSKAEIANKQKATLVCLARGFFPDHVELSWWVNGKEVHSGVCTDPQAYKESNYSYCLSSRLRVSATFWHNPRNHFRCQVQFHGLSEEDKWPEGSPKPVTQNISAEAWGRADCGITSASYQQGVLSATILYEILLGKATLYAVLVSTLVVMAMVKRKNS

SEQ ID NO: 2791 - protein, 6 aa, synthetic construct
DFQATT

SEQ ID NO: 2792 - protein, 7 aa, synthetic construct
SNEGSKA

SEQ ID NO: 2793 - protein, 11 aa, synthetic construct
SAGRASTDTQY

SEQ ID NO: 2794 - protein, 114 aa, synthetic construct
AVVSQHPSWVICKSGTSVKIECRSLDFQATTMFWYRQFPKQSLMLMATSNEGSKATYEQGVEKDKFLINHASLTLSTLTVTSAHPEDSSFYICSAGRASTDTQYFGPGTRLTVL

SEQ ID NO: 2795 - protein, 115 aa, synthetic construct; identical to SEQ ID NO: 2785

SEQ ID NO: 2796 - protein, 129 aa, synthetic construct
  VARIANT 2: note = X can be any Amino Acid
MXLLLLLLGPGSGLGAVVSQHPSWVICKSGTSVKIECRSLDFQATTMFWYRQFPKQSLMLMATSNEGSKATYEQGVEKDKFLINHASLTLSTLTVTSAHPEDSSFYICSAGRASTDTQYFGPGTRLTVL

SEQ ID NO: 2797 - protein, 129 aa, synthetic construct; identical to SEQ ID NO: 2796
  VARIANT 2: note = X can be any Amino Acid

SEQ ID NO: 2798 - protein, 302 aa, synthetic construct
MLLLLLLLGPGSGLGAVVSQHPSWVICKSGTSVKIECRSLDFQATTMFWYRQFPKQSLMLMATSNEGSKATYEQGVEKDKFLINHASLTLSTLTVTSAHPEDSSFYICSAGRASTDTQYFGPGTRLTVLEDLRNVTPPKVSLFEPSKAEIANKQKATLVCLARGFFPDHVELSWWVNGKEVHSGVCTDPQAYKESNYSYCLSSRLRVSATFWHNPRNHFRCQVQFHGLSEEDKWPEGSPKPVTQNISAEAWGRADCGITSASYQQGVLSATILYEILLGKATLYAVLVSTLVVMAMVKRKNS

SEQ ID NO: 2799 - protein, 302 aa, synthetic construct
MALLLLLLGPGSGLGAVVSQHPSWVICKSGTSVKIECRSLDFQATTMFWYRQFPKQSLMLMATSNEGSKATYEQGVEKDKFLINHASLTLSTLTVTSAHPEDSSFYICSAGRASTDTQYFGPGTRLTVLEDLRNVTPPKVSLFEPSKAEIANKQKATLVCLARGFFPDHVELSWWVNGKEVHSGVCTDPQAYKESNYSYCLSSRLRVSATFWHNPRNHFRCQVQFHGLSEEDKWPEGSPKPVTQNISAEAWGRADCGITSASYQQGVLSATILYEILLGKATLYAVLVSTLVVMAMVKRKNS

SEQ ID NO: 2800 - protein, 302 aa, synthetic construct
MHLLLLLLGPGSGLGAVVSQHPSWVICKSGTSVKIECRSLDFQATTMFWYRQFPKQSLMLMATSNEGSKATYEQGVEKDKFLINHASLTLSTLTVTSAHPEDSSFYICSAGRASTDTQYFGPGTRLTVLEDLRNVTPPKVSLFEPSKAEIANKQKATLVCLARGFFPDHVELSWWVNGKEVHSGVCTDPQAYKESNYSYCLSSRLRVSATFWHNPRNHFRCQVQFHGLSEEDKWPEGSPKPVTQNISAEAWGRADCGITSASYQQGVLSATILYEILLGKATLYAVLVSTLVVMAMVKRKNS

What is claimed:

1. A method of expanding a population of electroporated T cells comprising culturing the electroporated T cells with a first culture medium comprising one or more cytokines.

2. The method of claim 1, wherein the electroporated T cells are contacted with the first culture medium within 12 hours of electroporation.

3. The method of claim 1 or 2, wherein the one or more cytokines are selected from the group consisting of IL-7, IL-15, and IL-21.

4. The method of any one of claims 1 to 3, wherein the first culture medium further comprises an exogenous glutathione precursor.

5. The method of claim 4, wherein the glutathione precursor is N-acetylcysteine (NAC).

6. The method of any one of claims 1 to 5, wherein the first culture medium comprises IL-15.

7. The method of any one of claims 1 to 6, wherein the first culture medium comprises IL-7.

8. The method of any one of claims 1 to 7, wherein the first culture medium comprises IL-21.

9. The method of any one of claims 1 to 8, wherein the first culture medium comprises IL-7 and IL-21.

10. The method of any one of claims 1 to 9, wherein the electroporated T cells are electroporated prior to culturing with the first culture medium.

11. The method of claim 10, wherein the electroporated T cells are cultured in the first culture medium for 6-12 hours after electroporation.

12. The method of any one of claims 1 to 11 further comprising culturing the T cells with a second culture medium, wherein the second culture medium comprises one or more cytokines selected from the group consisting of IL-7, IL-12, and IL-21.

13. The method of claim 12, wherein the second culture medium comprises IL-7, IL-12, and IL-21.

14. The method of claim 12 or 13, wherein IL-21 is added to the second culture medium every 2 to 3 days.

15. The method of any one of claims 12 to 14, wherein at least one of the cytokines selected from the group consisting of IL-7 and IL-12 are added to the second culture medium only on the first day of culturing.

16. The method of claim 15, wherein IL-7 and IL-12 are added to the second culture medium only on the first day of culturing.

17. The method of any one of claims 12 to 16, wherein the T cells are cultured in the second culture medium after being cultured in the first culture medium.

18. The method of any one of claims 12 to 17, wherein the T cells are cultured in the second culture medium for 11 to 13 days.

19. The method of any one of claims 1 to 18, further comprising culturing the T cells with a third culture medium, wherein the third culture medium comprises one or more cytokines selected from the group consisting of IL-2 and IL-21.

20. The method of claim 19, wherein the third culture medium comprises IL-2.

21. The method of claim 19 or 20, wherein the third culture medium comprises IL-21.

22. The method of any one of claims 19 to 21, wherein the third culture medium further comprises IL-12.

23. The method of any one of claims 19 to 22, wherein the third culture medium further comprises an exogenous glutathione precursor.

24. The method of claim 23, wherein the exogenous glutathione precursor is NAC.

25. The method of any one of claims 19 to 24, wherein the third culture medium comprises IL-12, IL-21 and NAC.

26. The method of any one of claims 19 to 25, wherein the third culture medium comprises IL-2, IL-12, IL-21 and NAC.

27. The method of any one of claims 21 to 26, wherein IL-21 is added to the third culture medium every 2 to 3 days.

28. The method of any one of claims 20 or 22 to 26, wherein IL-2 is added to the third culture medium every 3 to 4 days.

29. The method of any one of claims 20 or 22 to 27, wherein IL-2 is present in the third culture medium in an amount from 30 U/ml to 3000 U/ml.

30. The method of any one of claims 22 to 29, wherein the IL-12 is added to the third culture medium only on the first day of culturing.

31. The method of any one of claims 19 to 30, wherein the T cells are cultured in the third culture medium after being cultured in the second culture medium.

32. The method of any one of claims 19 to 31, wherein the T cells are cultured in the third culture medium for 11 to 13 days.

33. The method of any one of claims 1 to 32, wherein the first, second and/or third culture media further comprise a TCR agonist.

34. The method of claim 33, wherein the TCR agonist is a CD3 agonist.

35. The method of any one of claims 1 to 34, wherein the first, second and/or third culture media further comprise an agonist of a T cell costimulatory molecule.

36. The method of claim 35, wherein the agonist of a T cell costimulatory molecule is a CD28 agonist.

37. The method of any one of claims 1 to 36, wherein the first, second and/or third culture media further comprise a nanomatrix.

38. The method of claim 37, wherein the TCR agonist and/or the T cell costimulatory molecule is associated with the nanomatrix.

39. The method of any one of claims 1 to 38, further comprising culturing the cells with feeder cells.

40. A population of engineered T cells manufactured according to the method of any one of claims 1 to 39.

41. The population of engineered T cells of claim 40, wherein more than 10% of the engineered T cells in the population comprise one or more of the following: an exogenous TCR or functional fragment thereof, and an exogenous membrane-bound IL-15.

42. The population of engineered T cells of claim 40, wherein more than 2% of the engineered T cells in the population co-express an exogenous TCR or functional fragment thereof and an exogenous membrane-bound IL-15.

43. A population of engineered T cells, wherein more than 10% of the engineered T cells in the population comprise an exogenous TCR or functional fragment thereof, and wherein more than 20% of the population of engineered T cells are CCR7+/CD45RO+.

44. A population of engineered T cells, wherein more than 10% of the engineered T cells in the population comprise an exogenous TCR or functional fragment thereof, and wherein more than 40% of the population of engineered T cells are CD95+/CD62L+.

45. The population of engineered T cells of claim 44, wherein the population of engineered T cells comprise more than 5%, 10%, 15%, 20%, 25%, 30%, 35%, 40%, 45% or 50% CD45RA+CD45RO-CD62L+CD95+ cells.

46. The population of engineered T cells of claim 44, wherein the population of engineered T cells comprise more than 5%, 10%, 15%, 20%, 25%, 30%, 35%, 40%, 45% or 50% CD45RA+CD45RO+CD62L+CD95+ cells.

47. A population of cells comprising a polycistronic expression cassette comprising:
a. a first cistron comprising a polynucleotide sequence that encodes a fusion protein that comprises IL-15, or a functional fragment or functional variant thereof, and IL-15Rα, or a functional fragment or functional variant thereof;
b. a second cistron comprising a polynucleotide sequence that encodes a TCR beta chain comprising a Vβ region and a Cβ region; and
c. a third cistron comprising a polynucleotide sequence that encodes a TCR alpha chain comprising a Vα region and a Cα region.

48. The population of cells of claim 47, wherein the population of cells are T cells that comprise more than 5%, 10%, 15%, 20%, 25%, 30%, 35%, 40%, 45% or 50% CD45RA+CD45RO-CD62L+CD95+ cells.

49. The population of cells of claim 47, wherein the population of cells are T cells that comprise more than 5%, 10%, 15%, 20%, 25%, 30%, 35%, 40%, 45% or 50% CD45RA+CD45RO+CD62L+CD95+ cells.
